(19) United States
(12) Patent Application Publication
(10) Pub. No.: US 2019/0201550 A1
(43) Pub. Date: Jul. 4, 2019

(54) COMPOSITIONS AND METHODS FOR TREATING CEP290-ASSOCIATED DISEASE

(71) Applicant: EDITAS MEDICINE, INC., CAMBRIDGE, MA (US)

(72) Inventors: Morgan Lee MAEDER, Jamaica Plain, MA (US); Rina J. MEPANI, Belmont, CA (US); David A. BUMCROT, Belmont, CA (US); Shen SHEN, Watertown, MA (US); Michael STEFANIDAKIS, Brookline, MA (US)

(21) Appl. No.: 16/053,763

(22) Filed: Aug. 2, 2018

Related U.S. Application Data
(63) Continuation-in-part of application No. 15/667,603, filed on Aug. 2, 2017.
Application No. 15/667,603 is a continuation-in-part of application No. 14/644,181, filed on Mar. 10, 2015, now Pat. No. 9,938,521.
(60) Provisional application No. 62/036,576, filed on Aug. 12, 2014.
(60) Provisional application No. 61/950,733, filed on Mar. 10, 2014.
(60) Provisional application No. 62/535,193, filed on Jul. 20, 2017.
(60) Provisional application No. 62/503,800, filed on May 9, 2017.
(60) Provisional application No. 62/443,568, filed on Jan. 6, 2017.
(60) Provisional application No. 62/400,526, filed on Sep. 27, 2016.
(60) Provisional application No. 62/370,202, filed on Aug. 2, 2016.

(51) Int. Cl. A61K 48/00; A61P 27/02

(52) U.S. Cl. CPC A61K 48/0058; A61K 48/0066; A61P 27/02; A61K 48/0091; A61K 48/0008

(57) ABSTRACT

Compositions and methods for treatment of CEP290 related diseases are disclosed.

### CROSS-REFERENCE TO RELATED APPLICATIONS

[0001] The present application is a continuation-in-part of U.S. patent application Ser. No. 15/667,603, filed Aug. 2, 2017, which is a continuation-in-part of U.S. patent application Ser. No. 14/644,181, filed Mar. 10, 2015, and claims the benefit of U.S. Provisional Appl. No. 61/950,733, filed Mar. 10, 2014; U.S. Provisional Appl. No. 62/036,576, filed Aug. 12, 2014; U.S. Provisional Appl. No. 62/370,202, filed Aug. 2, 2016; U.S. Provisional Appl. No. 62/400,526, filed Sep. 27, 2016; U.S. Provisional Appl. No. 62/443,568, filed Jan. 6, 2017; U.S. Provisional Appl. No. 62/503,800, filed May 9, 2017; and U.S. Provisional Appl. No. 62/535,193, filed Jul. 20, 2017; the contents of which are hereby incorporated by reference in their entirety.

### SEQUENCE LISTING

[0002] The instant application contains a Sequence Listing which has been submitted electronically in ASCII format and is hereby incorporated by reference in its entirety. Said ASCII copy, created on Aug. 2, 2018, is named SequenceListing.txt and is 1,535,149 bytes in size.

### FIELD OF THE INVENTION

[0003] The invention relates to CRISPR/CAS-related methods and components for editing of a target nucleic acid sequence, and applications thereof in connection with Leber's Congenital Amaurosis 10 (LCA10).

### BACKGROUND

[0004] Leber's congenital amaurosis (LCA) is the most severe form of inherited retinal dystrophy, with an onset of disease symptoms in the first years of life (Leber 1869) and an estimated prevalence of approximately 1 in 50,000 worldwide (Koenekoop 2007; Stone 2007). Genetically, LCA is a heterogeneous disease. To date, fifteen genes have been identified with mutations that result in LCA (den Hollander 2008; Estrada-Cuzcano 2011). The CEP290 gene is the most frequently mutated LCA gene accounting for approximately 15% of all cases (Stone 2007; den Hollander 2008; den Hollander 2006; Perrault 2007). Severe mutations in CEP290 have also been reported to cause systemic diseases that are characterized by brain defects, kidney malformations, polydactyly and/or obesity (Baal 2007; den Hollander 2008; Helou 2007; Valente 2006). Mutations of CEP290 are observed in several diseases, including Senior-Loken syndrome, Meckel Gruber syndrome, Bardet-Biedle syndrome, Joubert Syndrome, and Leber Congenital Amaurosis 10 (LCA10). Patients with LCA and early-onset retinal dystrophy often carry hypomorphic CEP290 alleles (Stone 2007; den Hollander 2006; Perrault 2007; Coppieters 2010; Littink 2010).

[0005] LCA, and other retinal dystrophies such as Retinitis Pigmentosa (RP), have long been considered incurable diseases. However, the first phase I/II clinical trials using gene augmentation therapy have led to promising results in a selected group of adult LCA/RP patients with mutations in the RPE65 gene (Bainbridge 2008; Cideciyan 2008; Hauswirth 2008; Maguire 2008). Unilateral subretinal injections of adeno-associated virus particles carrying constructs encoding the wild-type RPE65 cDNA were shown to be safe and moderately effective in some patients, without causing any adverse effects. In a follow-up study including adults and children, visual improvements were more sustained, especially in the children all of whom gained ambulatory vision (Maguire 2009). Although these studies demonstrated the potential to treat LCA using gene augmentation therapy and increased the development of therapeutic strategies for other genetic subtypes of retinal dystrophies (den Hollander 2010), it is hard to control the expression levels of the therapeutic genes when using gene augmentation therapy.

[0006] LCA10, one type of LCA, is an inherited (autosomal recessive) retinal degenerative disease characterized by severe loss of vision at birth. All subjects having LCA10 have had at least one c.2991+1655A to G (adenine to guanine) mutation in the CEP290 gene. Heterozygous nonsense, frameshift, and splice-site mutations have been identified on the remaining allele. A c.2991+1655A to G mutation in the CEP290 gene give rise to a cryptic splice donor cite in intron 26 which results in the inclusion of an aberrant exon of 128 bp in the mutant CEP290 mRNA, and inserts a premature stop codon (P.C998X). The sequence of the cryptic exon contains part of an Alu repeat.

[0007] There are currently no approved therapeutics for LCA10. Despite advances that have been made using gene therapy, there remains a need for therapeutics to treat retinal dystrophies, including LCA10.

### SUMMARY OF THE INVENTION

[0008] The inventors have addressed a key unmet need in the field by providing new and effective means of delivering genome editing systems to the affected tissues of subjects suffering from CEP290 associated diseases and other inherited retinal dystrophies. This disclosure provides nucleic acids and vectors for efficient transduction of genome editing systems in retinal cells and cells in other tissues, as well as methods of using these vectors to treat subjects. These nucleic acids, vectors and methods represent an important step forward in the development of treatments for CEP290 associated diseases.

[0009] In one aspect, the disclosure relates to a method for treating or altering a cell in a subject (e.g., a human subject or an animal subject), that includes administering to the subject a nucleic acid encoding a Cas9 and first and second guide RNAs (gRNAs) targeted to the CEP290 gene of the subject. In certain embodiments, the first and second gRNAs are targeted to one or more target sequences that encompass or are proximal to a CEP290 target position. The first gRNA may include a targeting domain selected from SEQ ID NOs: 389-391 (corresponding RNA sequences in SEQ ID NOs: 530, 468, and 538, respectively), while the second gRNA may include a targeting domain selected from SEQ ID NOs: 388, 392, and 394 (corresponding RNA sequences in SEQ ID NOs: 558, 460, 568, respectively). The Cas9, which may be a modified Cas9 (e.g., a Cas9 engineered to alter PAM specificity, improve fidelity, or to alter or improve another structural or functional aspect of the Cas9), may include one or more of a nuclear localization signal (NLS) and/or a polyadenylation signal. Certain embodiments are characterized by Cas9s that include both a C-terminal and an N-terminal NLS. The Cas9 is encoded, in certain embodiments, by SEQ ID NO: 39, and its expression is optionally driven by one of a CMV, EFS, or hGRK1 promoter, as set out in SEQ ID NOs: 401-403 respectively. The nucleic acid also includes, in various cases, first and second inverted terminal repeat sequences (ITRs).

[0010] Continuing with this aspect of the disclosure, a nucleic acid comprising any or all of the features described above may be administered to the subject via an adeno-associated viral (AAV) vector, such as an AAV5 vector. The vector may be delivered to the retina of the subject (for example, by subretinal injection). Various embodiments of the method may be used in the treatment of human subjects. For example, the methods may be used to treat subjects suffering from a CEP290 associated disease such as LCA10, to restore CEP290 function in a subject in need thereof, and/or to alter a cell in the subject, such as a retinal cell and/or a photoreceptor cell.

[0011] In another aspect, this disclosure relates to a nucleic acid encoding a Cas9, a first gRNA with a targeting domain selected from SEQ ID NOs: 389-391 (corresponding RNA sequences in SEQ ID NOs: 530, 468, and 538, respectively), and a second gRNA with a targeting domain selected from SEQ ID NOs: 388, 392, and 394 (corresponding RNA sequences in SEQ ID NOs: 558, 460, and 568, respectively). The nucleic acid may, in various embodiments, incorporate any or all of the features described above (e.g., the NLS and/or polyadenylation signal; the CMV, EFS or hGRK1 promoter; and/or the ITRs). The nucleic acid may be part of an AAV vector, which vector may be used in medicine, for example to treat a CEP290 associated disease such as LCA10, and/or may be used to edit specific cells including retinal cells, for instance retinal photoreceptor cells. The nucleic acid may also be used for the production of a medicament.

[0012] In yet another aspect, this disclosure relates to a method of treating a subject that includes the step of contacting a retina of the subject with one or more recombinant viral vectors (e.g., AAV vectors) that encode a Cas9 and first and second gRNAs. The first and second gRNAs are adapted to form first and second ribonucleoprotein complexes with the Cas9, and the first and second complexes in turn are adapted to cleave first and second target sequences, respectively, on either side of a CEP290 target position as that term is defined below. This cleavage results in the alteration of the nucleic acid sequence of the CEP290 target position. In some embodiments, the step of contacting the retina with one or more recombinant viral vectors includes administering to the retina of the subject, by subretinal injection, a composition comprising the one or more recombinant viral vectors. The alteration of the nucleic acid sequence of the CEP290 target position can include formation of an indel, deletion of part or all of the CEP290 target position, and/or inversion of a nucleotide sequence in the CEP290 target position. The subject, in certain embodiments, is a primate.

[0013] The genome editing systems, compositions, and methods of the present disclosure can support high levels of productive editing in retinal cells, e.g., in photoreceptor cells. In certain embodiments, 10%, 15%, 20%, or 25% of retinal cells in samples modified according to the methods of this disclosure (e.g., in retinal samples contacted with a genome editing system of this disclosure) comprise a productive alteration of an allele of the CEP290 gene. A productive alteration may include, variously, a deletion and/or inversion of a sequence comprising an IVS26 mutation, or another modification that results in an increase in the expression of functional CEP290 protein in a cell. In certain embodiments, 25%, 30%, 35%, 40%, 45%, 50%, or more than 50% of photoreceptor cells in retinal samples modified according to the methods of this disclosure (e.g., in retinal samples contacted with a genome editing system of this disclosure) comprise a productive alteration of an allele of the CEP290 gene.

[0014] In another aspect, this disclosure relates to a nucleic acid encoding a Cas9 and first and second gRNAs targeted to a CEP290 gene of a subject for use in therapy, e.g. in the treatment of CEP290-associated disease. The CEP290 associated disease may be, in some embodiments, LCA10, and in other embodiments may be selected from the group consisting of Senior-Loken syndrome, Meckel Gruber syndrome, Bardet-Biedle syndrome and Joubert Syndrome. A targeting domain of the first gRNA may comprise a sequence selected from SEQ ID NOs: 389-391 (corresponding RNA sequences in SEQ ID NOs: 530, 468, and 538, respectively), and a targeting domain of the second gRNA may comprise a sequence selected from SEQ ID NOs: 388, 392, and 394, respectively (corresponding RNA sequences in SEQ ID NOs: 558, 460, and 568, respectively). In certain embodiments, the first and second gRNA targeting domains comprise SEQ ID NOs: 389 and 388, respectively. In other embodiments, the first and second gRNA targeting domains comprise the sequences of SEQ ID NOs: 389 and 392, respectively; SEQ ID NOs: 389 and 394, respectively; SEQ ID NOs: 390 and 388, respectively; SEQ ID NOs: 391 and 388, respectively; or SEQ ID NOs: 391 and 392, respectively. In still other embodiments, the first and second targeting domains comprise the sequences of SEQ ID NOs: 390 and 392, respectively; SEQ ID NOs: 390 and 394, respectively; or SEQ ID NOs: 391 and 394, respectively. The gRNAs according to this aspect of the disclosure may be unimolecular, and may comprise RNA sequences according to SEQ ID NOs: 2779 or 2786 (corresponding to the DNA sequences of SEQ ID NOs: 2785 and 2787, respectively). Alternatively, the gRNAs may be two-part modular gRNAs according to either sequence, where the crRNA component comprises the portion of SEQ ID NO: 2785/2779 or 2787/2786 that is underlined below, and the tracrRNA component comprises the portion that is double-underlined below:

DNA:
(SEQ ID NO: 2785)
[N]₁₆₋₂₄GTTTTAGTACTCTGGAAACAGAATCTACTAAAACAAGGCAAA
ATGCCGTGTTTATCTCGTCAACTTGTTGGCGAGATTTTTT
and
RNA:
(SEQ ID NO: 2779)
[N]₁₆₋₂₄GUUUUAGUACUCUGGAAACAGAAUCUACUAAAACAAGGCAA
AAUGCCGUGUUUAUCUCGUCAACUUGUUGGCGAGAUUUUUU.
DNA:
(SEQ ID NO: 2787)
N₁₆₋₂₄GTTATAGTACTCTGGAAACAGAATCTACTATAACAAGGCAAA
ATGCCGTGTTTATCTCGTCAACTTGTTGGCGAGATTTTTT
and
RNA:
(SEQ ID NO: 2786)
N₁₆₋₂₄GUUAUAGUACUCUGGAAACAGAAUCUACUAUAACAAGGCAAAAU
GCCGUGUUUAUCUCGUCAACUUGUUGGCGAGAUUUUUU.

[0015] Continuing with this aspect of the disclosure, the Cas9 encoded by the nucleic acid is, in certain embodiments, a Staphylococcus aureus Cas9, which may be encoded by a sequence comprising SEQ ID NO: 39, or having at least 80%, 85%, 90%, 95% or 99% sequence identity thereto. The Cas9 encoded by the nucleic acid may comprise the amino acid sequence of SEQ ID NO: 26 or may share at least 80%, 85%, 90%, 95% or 99% sequence identity therewith. The Cas9 may be modified in some instances, for example to include one or more nuclear localization signals (NLSs) (e.g., a C-terminal and an N-terminal NLS) and/or a polyadenylation signal. Cas9 expression may be driven by a promoter sequence such as the promoter sequence comprising SEQ ID NO: 401, the promoter sequence comprising SEQ ID NO: 402, or the promoter sequence comprising SEQ ID NO: 403.

[0016] Staying with this aspect of the disclosure, the promoter sequence for driving the expression of the Cas9 comprises, in certain embodiments, the sequence of a human GRK1 promoter. In other embodiments, the promoter comprises the sequence of a cytomegalovirus (CMV) promoter or an EFS promoter. For example, the nucleic acid may comprise, in various embodiments, (a) a CMV promoter for Cas9 and gRNAs comprising (or differing by no more than 3 nucleotides from) targeting domains according to SEQ ID NOs: 389 and 392, or (b) a CMV promoter for Cas9 and gRNAs comprising targeting domains according to SEQ ID NOs: 389 and 394, or c) a CMV promoter for Cas9 and gRNAs comprising targeting domains according to SEQ ID NOs: 390 and 388, or d) a CMV promoter for Cas9 and gRNAs comprising targeting domains according to SEQ ID NOs: 391 and 388, or e) a CMV promoter for Cas9 and gRNAs comprising targeting domains according to SEQ ID NOs: 391 and 392, or f) an EFS promoter for Cas9 and gRNAs comprising targeting domains according to SEQ ID NOs: 389 and 392, or g) an EFS promoter for Cas9 and gRNAs comprising targeting domains according to SEQ ID NOs: 389 and 394, or h) an EFS promoter for Cas9 and gRNAs comprising targeting domains according to SEQ ID NOs: 390 and 388, or i) an EFS promoter for Cas9 and gRNAs comprising targeting domains according to SEQ ID NOs: 391 and 388, or j) an EFS promoter for Cas9 and gRNAs comprising targeting domains according to SEQ ID NOs: 391 and 392, or k) an hGRK1 promoter for Cas9 and gRNAs comprising targeting domains according to SEQ ID NOs: 389 and 392, or g) an hGRK1 promoter for Cas9 and gRNAs comprising targeting domains according to SEQ ID NOs: 389 and 394, or h) an hGRK1 promoter for Cas9 and gRNAs comprising targeting domains according to SEQ ID NOs: 390 and 388, or i) an hGRK1 promoter for Cas9 and gRNAs comprising targeting domains according to SEQ ID NOs: 391 and 388, or j) an hGRK1 promoter for Cas9 and gRNAs comprising targeting domains according to SEQ ID NOs: 391 and 392. In other embodiments, the nucleic acid comprises a CMV promoter and guide RNA targeting sequences according to SEQ ID NOs: 389 and 388. In still other embodiments, the nucleic acid comprises an hGRK promoter and guide RNA targeting sequences according to SEQ ID NOs: 390 and 392, or it comprises a CMV promoter and guide RNA targeting sequences according to SEQ ID NOs: 390 and 392, or an hGRK promoter and guide RNA targeting sequences according to SEQ ID NOs: 390 and 394, or it comprises a CMV promoter and guide RNA targeting sequences according to SEQ ID NOs: 391 and 394, or an hGRK promoter and guide RNA targeting sequences according to SEQ ID NOs: 391 and 394, or it comprises a CMV promoter and guide RNA targeting sequences according to SEQ ID NOs: 390 and 392. And in further embodiments, the promoter is hGRK or CMV while the first and second gRNA targeting domains comprise the sequences of SEQ ID NOs: 389 and 392, SEQ ID NOs: 389 and 394, SEQ ID NOs: 390 and 388, SEQ ID NOs: 391 and 388, or SEQ ID NOs: 391 and 392.

[0017] In another aspect, the present disclosure relates to adeno-associated virus (AAV) vectors comprising the nucleic acids described above. AAV vectors comprising the foregoing nucleic acids may be administered to a variety of tissues of a subject, though in certain embodiments the AAV vectors are administered to a retina of the subject, and/or are administered by subretinal injection. The AAV vector may comprise an AAV5 capsid.

[0018] An additional aspect of this disclosure relates to a nucleic acid as described above, for delivery via an AAV vector also as described above. The nucleic acid includes in some embodiments, first and second inverted terminal repeat sequences (ITRs), a first guide RNA comprising a targeting domain sequence selected from SEQ ID NOs: 389-391 (corresponding RNA sequences in SEQ ID NOs: 530, 468, and 538, respectively), a second guide RNA comprising a targeting domain sequence selected from SEQ ID NOs: 388, 392, and 394 (corresponding RNA sequences in SEQ ID NOs: 558, 460, and 568, respectively), and a promoter for driving Cas9 expression comprising a sequence selected from SEQ ID NOs: 401-403. In certain embodiments, the nucleic acid includes first and second ITRs and first and second guide RNAs comprising a guide RNA sequence selected from SEQ ID NOs: 2785 and 2787 (e.g., both first and second guide RNAs comprise the sequence of SEQ ID NO: 2787). The nucleic acid may be used in the treatment of human subjects, and/or in the production of a medicament.

[0019] The nucleic acids and vectors according to these aspects of the disclosure may be used in medicine, for instance in the treatment of disease. In some embodiments, they are used in the treatment of a CEP290-associated disease, in the treatment of LCA10, or in the treatment of one or more of the following: Senior-Loken syndrome, Meckel Gruber syndrome, Bardet-Biedle syndrome, and/or Joubert Syndrome. Without wishing to be bound by theory, it is contemplated that the nucleic acids and vectors disclosed herein may be used to treat other inherited retinal diseases by adapting the gRNA targeting domains to target and alter the gene of interest. In certain embodiments, the nucleic acids and vectors according to the disclosure may be used for the treatment of other inherited retinal diseases as set forth in Stone 2017, which is incorporated by reference herein in its entirety. For example, in certain embodiments, the nucleic acids and vectors disclosed herein may be used to treat USH2A-related disorders by including gRNAs comprising targeting domains that alter the USH2A gene. Vectors and nucleic acids according to this disclosure may be administered to the retina of a subject, for instance by subretinal injection.

[0020] This disclosure also relates to recombinant viral vectors comprising the nucleic acids described above, and to the use of such viral vectors in the treatment of disease. In some embodiments, one or more viral vectors encodes a Cas9, a first gRNA and a second gRNA for use in a method of altering a nucleotide sequence of a CEP 290 target position wherein (a) the first and second gRNAs are adapted to form first and second ribonucleoprotein complexes with the Cas9, and (b) the first and second ribonucleoprotein complexes are adapted to cleave first and second cellular nucleic acid sequences on first and second sides of a CEP290 target position, thereby altering a nucleotide sequence of the CEP290 target position. In use, the one or more recombinant viral vectors is contacted to the retina of a subject, for instance by subretinal injection.

[0021] Another aspect of this disclosure relates to AAV vectors, AAV vector genomes and/or nucleic acids that may be carried by AAV vectors, which encode one or more guide RNAs, each comprising a sequence selected from—or having at least 90% sequence identity to—one of SEQ ID NOs: 2785 or 2787, a sequence encoding a Cas9 and a promoter sequence operably coupled to the Cas9 coding sequence, which promoter sequence comprises a sequence selected from—or having at least 90% sequence identity to—one of SEQ ID NOs: 401-403. The Cas9 coding sequence may comprise the sequence of SEQ ID NO: 39, or it may share at least 90% sequence identity therewith. Alternatively or additionally, the Cas9 coding sequence may encode an amino acid sequence comprising SEQ ID NO: 26, or sharing at least 90% sequence identity therewith. In certain embodiments, the AAV vector, vector genome or nucleic acid further comprises one or more of the following: left and right ITR sequences, optionally selected from—or having at least 90% sequence identity to—SEQ ID NOs: 408 and 437, respectively; and one or more U6 promoter sequences operably coupled to the one or more guide RNA sequences. The U6 promoter sequences may comprise, or share at least 90% sequence identity with, SEQ ID NO: 417.

[0022] Methods and compositions discussed herein, provide for treating or delaying the onset or progression of diseases of the eye, e.g., disorders that affect retinal cells, e.g., photoreceptor cells.

[0023] Methods and compositions discussed herein, provide for treating or delaying the onset or progression of Leber's Congenital Amaurosis 10 (LCA10), an inherited retinal degenerative disease characterized by severe loss of vision at birth. LCA10 is caused by a mutation in the CEP290 gene, e.g., a c.2991+1655A to G (adenine to guanine) mutation in the CEP290 gene which gives rise to a cryptic splice site in intron 26. This is a mutation at nucleotide 1655 of intron 26 of CEP290, e.g., an A to G mutation. CEP290 is also known as: CT87; MKS4; POC3; rd16; BBS14; JBTS5; LCA10; NPHP6; SLSN6; and 3H11Ag.

[0024] Methods and compositions discussed herein, provide for treating or delaying the onset or progression of LCA10 by gene editing, e.g., using CRISPR-Cas9 mediated methods to alter a LCA10 target position, as disclosed below.

[0025] “LCA10 target position” as used herein refers to nucleotide 1655 of intron 26 of the CEP290 gene, and the mutation at that site that gives rise to a cryptic splice donor site in intron 26 which results in the inclusion of an aberrant exon of 128 bp (c.2991+1523 to c.2991+1650) in the mutant CEP290 mRNA, and inserts a premature stop codon (p.C998X). The sequence of the cryptic exon contains part of an Alu repeat region. The Alu repeats span from c.2991+1162 to c.2991+1638. In an embodiment, the LCA10 target position is occupied by an adenine (A) to guanine (G) mutation (c.2991+1655A to G).

[0026] In one aspect, methods and compositions discussed herein, provide for altering a LCA10 target position in the CEP290 gene. The methods and compositions described herein introduce one or more breaks near the site of the LCA target position (e.g., c.2991+1655A to G) in at least one allele of the CEP290 gene. Altering the LCA10 target position refers to (1) break-induced introduction of an indel (also referred to herein as NHEJ-mediated introduction of an indel) in close proximity to or including a LCA10 target position (e.g., c.2991+1655A to G), or (2) break-induced deletion (also referred to herein as NHEJ-mediated deletion) of genomic sequence including the mutation at a LCA10 target position (e.g., c.2991+1655A to G). Both approaches give rise to the loss or destruction of the cryptic splice site resulting from the mutation at the LCA10 target position (e.g., c.2991+1655A to G).

[0027] In an embodiment, a single strand break is introduced in close proximity to or at the LCA10 target position (e.g., c.2991+1655A to G) in the CEP290 gene. While not wishing to be bound by theory, it is believed that break-induced indels (e.g., indels created following NHEJ) destroy the cryptic splice site. In an embodiment, the single strand break will be accompanied by an additional single strand break, positioned by a second gRNA molecule.

[0028] In an embodiment, a double strand break is introduced in close proximity to or at the LCA10 target position (e.g., c.2991+1655A to G) in the CEP290 gene. While not wishing to be bound by theory, it is believed that break-induced indels (e.g., indels created following NHEJ) destroy the cryptic splice site. In an embodiment, a double strand break will be accompanied by an additional single strand break may be positioned by a second gRNA molecule. In an embodiment, a double strand break will be accompanied by two additional single strand breaks positioned by a second gRNA molecule and a third gRNA molecule.

[0029] In an embodiment, a pair of single strand breaks is introduced in close proximity to or at the LCA10 target position (e.g., c.2991+1655A to G) in the CEP290 gene. While not wishing to be bound by theory, it is believed that break-induced indels destroy the cryptic splice site. In an embodiment, the pair of single strand breaks will be accompanied by an additional double strand break, positioned by a third gRNA molecule. In an embodiment, the pair of single strand breaks will be accompanied by an additional pair of single strand breaks positioned by a third gRNA molecule and a fourth gRNA molecule.

[0030] In an embodiment, two double strand breaks are introduced to flank the LCA10 target position in the CEP290 gene (one 5′ and the other one 3′ to the mutation at the LCA10 target position, e.g., c.2991+1655A to G) to remove (e.g., delete) the genomic sequence including the mutation at the LCA10 target position. It is contemplated herein that in an embodiment the break-induced deletion of the genomic sequence including the mutation at the LCA10 target position is mediated by NHEJ. In an embodiment, the breaks (i.e., the two double strand breaks) are positioned to avoid unwanted target chromosome elements, such as repeat elements, e.g., an Alu repeat. The breaks, i.e., two double strand breaks, can be positioned upstream and downstream of the LCA10 target position, as discussed herein.

[0031] In an embodiment, one double strand break (either 5′ or 3′ to the mutation at the LCA10 target position, e.g., c.2991+1655A to G) and two single strand breaks (on the other side of the mutation at the LCA10 target position from the double strand break) are introduced to flank the LCA10 target position in the CEP290 gene to remove (e.g., delete) the genomic sequence including the mutation at the LCA10 target position. It is contemplated herein that in an embodiment the break-induced deletion of the genomic sequence including the mutation at the LCA10 target position is mediated by NHEJ. In an embodiment, the breaks (i.e., the double strand break and the two single strand breaks) are positioned to avoid unwanted target chromosome elements, such as repeat elements, e.g., an Alu repeat. The breaks, e.g., one double strand break and two single strand breaks, can be positioned upstream and downstream of the LCA10 target position, as discussed herein.

[0032] In an embodiment, two pairs of single strand breaks (two 5′ and the other two 3′ to the mutation at the LCA10 target position, e.g., c.2991+1655A to G) are introduced to flank the LCA10 target position in the CEP290 gene to remove (e.g., delete) the genomic sequence including the mutation at the LCA10 target position. It is contemplated herein that in an embodiment the break-induced deletion of the genomic sequence including the mutation at the LCA10 target position is mediated by NHEJ. In an embodiment, the breaks (e.g., two pairs of single strand breaks) are positioned to avoid unwanted target chromosome elements, such as repeat elements, e.g., an Alu repeat. The breaks, e.g., two pairs of single strand breaks, can be positioned upstream or downstream of the LCA10 target position, as discussed herein.

[0033] The LCA10 target position may be targeted by cleaving with either a single nuclease or dual nickases, e.g., to induce break-induced indel in close proximity to or including the LCA10 target position or break-induced deletion of genomic sequence including the mutation at the LCA10 target position in the CEP290 gene. The method can include acquiring knowledge of the mutation carried by the subject, e.g., by sequencing the appropriate portion of the CEP290 gene.

[0034] In one aspect, disclosed herein is a gRNA molecule, e.g., an isolated or non-naturally occurring gRNA molecule, comprising a targeting domain which is complementary with a target domain from the CEP290 gene.

[0035] When two or more gRNAs are used to position two or more cleavage events, e.g., double strand or single strand breaks, in a target nucleic acid, it is contemplated that in an embodiment the two or more cleavage events may be made by the same or different Cas9 proteins. For example, when two gRNAs are used to position two double strand breaks, a single Cas9 nuclease may be used to create both double strand breaks. When two or more gRNAs are used to position two or more single stranded breaks (single strand breaks), a single Cas9 nickase may be used to create the two or more single strand breaks. When two or more gRNAs are used to position at least one double strand break and at least one single strand break, two Cas9 proteins may be used, e.g., one Cas9 nuclease and one Cas9 nickase. It is contemplated that in an embodiment when two or more Cas9 proteins are used that the two or more Cas9 proteins may be delivered sequentially to control specificity of a double strand versus a single strand break at the desired position in the target nucleic acid.

[0036] In some embodiments, the targeting domain of the first gRNA molecule and the targeting domain of the second gRNA molecule hybridize to the target domain from the target nucleic acid molecule (i.e., the CEP290 gene) through complementary base pairing to opposite strands of the target nucleic acid molecule. In some embodiments, the first gRNA molecule and the second gRNA molecule are configured such that the PAMs are oriented outward.

[0037] In an embodiment, the targeting domain of a gRNA molecule is configured to avoid unwanted target chromosome elements, such as repeat elements, e.g., an Alu repeat, or the endogenous CEP290 splice sites, in the target domain. The gRNA molecule may be a first, second, third and/or fourth gRNA molecule.

[0038] In an embodiment, the targeting domain of a gRNA molecule is configured to position a cleavage event sufficiently far from a preselected nucleotide, e.g., the nucleotide of a coding region, such that the nucleotide is not altered. In an embodiment, the targeting domain of a gRNA molecule is configured to position an intronic cleavage event sufficiently far from an intron/exon border, or naturally occurring splice signal, to avoid alteration of the exonic sequence or unwanted splicing events. The gRNA molecule may be a first, second, third and/or fourth gRNA molecule, as described herein.

[0039] In an embodiment, the LCA10 target position in the CEP290 gene is targeted. In an embodiment, the targeting domain comprises a sequence that is the same as, or differs by no more than 1, 2, 3, 4, or 5 nucleotides from, a targeting domain sequence from Table 11. In some embodiments, the targeting domain is selected from those in Table 11. For example, in certain embodiments, the targeting domain is:

(SEQ ID NO: 387)
GACACTGCCAATAGGGATAGGT;
(SEQ ID NO: 388)
GTCAAAAGCTACCGGTTACCTG;
(SEQ ID NO: 389)
GTTCTGTCCTCAGTAAAAGGTA;
(SEQ ID NO: 390)
GAATAGTTTGTTCTGGGTAC;
(SEQ ID NO: 391)
GAGAAAGGGATGGGCACTTA;
(SEQ ID NO: 392)
GATGCAGAACTAGTGTAGAC;
(SEQ ID NO: 393)
GTCACATGGGAGTCACAGGG;
or
(SEQ ID NO: 394)
GAGTATCTCCTGTTTGGCA.

[0040] In an embodiment, when two or more gRNAs are used to position two or more breaks, e.g., two or more single strand breaks in the target nucleic acid sequence, each guide RNA is independently selected from one of Table 11. In an embodiment, the two or more gRNAs or targeting domains are selected from one or more of the pairs of gRNAs or targeting domains described herein, e.g., as indicated in Table 11. In an embodiment, when two or more gRNAs are used to position four breaks, e.g., four single strand breaks in the target nucleic acid sequence, each guide RNA is independently selected from one of Table 11.

[0041] In an embodiment, the LCA10 target position in the CEP290 gene is targeted. In an embodiment, the targeting domain comprises a sequence that is the same as, or differs by no more than 1, 2, 3, 4, or 5 nucleotides from, a targeting domain sequence from Table 2A-2D. In some embodiments, the targeting domain is selected from those in Table 2A-2D. For example, in certain embodiments, the targeting domain is:

(SEQ ID NO: 395)
GAGAUACUCACAAUUACAAC;
or
(SEQ ID NO: 396)
GAUACUCACAAUUACAACUG.

[0042] In an embodiment, when two or more gRNAs are used to position two or more breaks, e.g., two or more single strand breaks in the target nucleic acid sequence, each guide RNA is independently selected from one of Tables 2A-2D. In an embodiment, when two or more gRNAs are used to position four breaks, e.g., four single strand breaks in the target nucleic acid sequence, each guide RNA is independently selected from one of Tables 2A-2D.

[0043] In an embodiment, the LCA10 target position in the CEP290 gene is targeted. In an embodiment, the targeting domain comprises a sequence that is the same as, or differs by no more than 1, 2, 3, 4, or 5 nucleotides from, a targeting domain sequence from Tables 3A-3C. In some embodiments, the targeting domain is selected from those in Tables 3A-3C. For example, in certain embodiments, the targeting domain is:

(SEQ ID NO: 395)
GAGAUACUCACAAUUACAAC;
or
(SEQ ID NO: 397)
GAUACUCACAAUUACAA.

[0044] In an embodiment, when two or more gRNAs are used to position two or more breaks, e.g., two or more single stranded breaks in the target nucleic acid sequence, each guide RNA is independently selected from one of Tables 3A-3C. In an embodiment, when two or more gRNAs are used to position four breaks, e.g., four single strand breaks in the target nucleic acid sequence, each guide RNA is independently selected from one of Tables 3A-3C.

[0045] In an embodiment, the LCA10 target position in the CEP290 gene is targeted. In an embodiment, the targeting domain comprises a sequence that is the same as, or differs by no more than 1, 2, 3, 4, or 5 nucleotides from, a targeting domain sequence from Tables 7A-7D. In some embodiments, the targeting domain is selected from those in Tables 7A-7D. For example, in certain embodiments, the targeting domain is:

(SEQ ID NO: 398)

GCACCUGGCCCCAGUUGUAAUU.

[0046] In an embodiment, when two or more gRNAs are used to position two or more breaks, e.g., two or more single stranded breaks in the target nucleic acid sequence, each guide RNA is independently selected from one of Tables 7A-7D. In an embodiment, when two or more gRNAs are used to position four breaks, e.g., four single strand breaks in the target nucleic acid sequence, each guide RNA is independently selected from one of Tables 7A-7D.

[0047] In an embodiment, the LCA10 target position in the CEP290 gene is targeted. In an embodiment, the targeting domain comprises a sequence that is the same as, or differs by no more than 1, 2, 3, 4, or 5 nucleotides from, a targeting domain sequence from Tables 4A-4D. In some embodiments, the targeting domain is selected from those in Tables 4A-4D. For example, in certain embodiments, the targeting domain is:

(SEQ ID NO: 457)

GCUACCGGUUACCUGAA;

(SEQ ID NO: 458)

GCAGAACUAGUGUAGAC;

(SEQ ID NO: 459)

GUUGAGUAUCUCCUGUU;

(SEQ ID NO: 460)

GAUGCAGAACUAGUGUAGAC;
or

(SEQ ID NO: 461)

GCUUGAACUCUGUGCCAAAC.

[0048] In an embodiment, when two or more gRNAs are used to position two or more breaks, e.g., two or more single stranded breaks in the target nucleic acid sequence, each guide RNA is independently selected from one of Tables 4A-4D. In an embodiment, when two or more gRNAs are used to position four breaks, e.g., four single strand breaks in the target nucleic acid sequence, each guide RNA is independently selected from one of Tables 4A-4D.

[0049] In an embodiment, the LCA10 target position in the CEP290 gene is targeted. In an embodiment, the targeting domain comprises a sequence that is the same as, or differs by no more than 1, 2, 3, 4, or 5 nucleotides from, a targeting domain sequence from Tables 8A-8D. In some embodiments, the targeting domain is selected from those in Tables 8A-8D. For example, in certain embodiments, the targeting domain is:

(SEQ ID NO: 457)

GCUACCGGUUACCUGAA;

(SEQ ID NO: 458)

GCAGAACUAGUGUAGAC;

(SEQ ID NO: 459)

GUUGAGUAUCUCCUGUU;

(SEQ ID NO: 460)

GAUGCAGAACUAGUGUAGAC;

(SEQ ID NO: 461)

GCUUGAACUCUGUGCCAAAC;

(SEQ ID NO: 462)

GAAAGAUGAAAAAUACUCUU;

(SEQ ID NO: 463)

GAAAUAGAUGUAGAUUG;

(SEQ ID NO: 464)

GAAAUAUUAAGGGCUCUUCC;

(SEQ ID NO: 465)

GAACAAAAGCCAGGGACCAU;

(SEQ ID NO: 466)

GAACUCUAUACCUUUUACUG;

(SEQ ID NO: 467)

GAAGAAUGGAAUAGAUAAUA;

(SEQ ID NO: 468)

GAAUAGUUUGUUCUGGGUAC;

(SEQ ID NO: 469)

GAAUGGAAUAGAUAAUA;

(SEQ ID NO: 470)

GAAUUUACAGAGUGCAUCCA;

(SEQ ID NO: 471)

GAGAAAAAGGAGCAUGAAAC;

(SEQ ID NO: 472)

GAGAGCCACAGUGCAUG;

(SEQ ID NO: 473)

GAGGUAGAAUCAAGAAG;

(SEQ ID NO: 474)

GAGUGCAUCCAUGGUCC;

(SEQ ID NO: 475)

GAUAACUACAAAGGGUC;

(SEQ ID NO: 476)

GAUAGAGACAGGAAUAA;

(SEQ ID NO: 477)

GAUGAAAAAUACUCUUU;

(SEQ ID NO: 478)

GAUGACAUGAGGUAAGU;

(SEQ ID NO: 479)

GCAUGUGGUGUCAAAUA;

(SEQ ID NO: 480)

GCCUGAACAAGUUUUGAAAC;

(SEQ ID NO: 481)

GCUCUUUUCUAUAUAUA;

(SEQ ID NO: 482)

GCUUUUGACAGUUUUUAAGG;

(SEQ ID NO: 483)

GCUUUUGUUCCUUGGAA;

(SEQ ID NO: 484)

GGAACAAAAGCCAGGGACCA;

(SEQ ID NO: 485)

GGACUUGACUUUUACCCUUC;

(SEQ ID NO: 486)

GGAGAAUAGUUUGUUCU;

(SEQ ID NO: 487)

GGAGUCACAUGGGAGUCACA;

(SEQ ID NO: 488)

GGAUAGGACAGAGGACA;

(SEQ ID NO: 489)

GGCUGUAAGAUAACUACAAA;

(SEQ ID NO: 490)

GGGAGAAUAGUUUGUUC;

(SEQ ID NO: 491)

GGGAGUCACAUGGGAGUCAC;

(SEQ ID NO: 492)

GGGCUCUUCCUGGACCA;

(SEQ ID NO: 493)

GGGUACAGGGGUAAGAGAAA;

(SEQ ID NO: 494)

GGUCCCUGGCUUUUGUUCCU;

(SEQ ID NO: 495)

GUAAAGGUUCAUGAGACUAG;

(SEQ ID NO: 496)

GUAACAUAAUCACCUCUCUU;

(SEQ ID NO: 497)

GUAAGACUGGAGAUAGAGAC;

(SEQ ID NO: 498)

GUACAGGGGUAAGAGAA;

(SEQ ID NO: 499)

GUAGCUUUUGACAGUUUUUA;

(SEQ ID NO: 500)

GUCACAUGGGAGUCACA;

(SEQ ID NO: 501)

GUGGAGAGCCACAGUGCAUG;

(SEQ ID NO: 502)

GUUACAAUCUGUGAAUA;

(SEQ ID NO: 503)

GUUCUGUCCUCAGUAAA;

(SEQ ID NO: 504)

GUUUAGAAUGAUCAUUCUUG;

(SEQ ID NO: 505)

GUUUGUUCUGGGUACAG;

(SEQ ID NO: 506)

UAAAAACUGUCAAAAGCUAC;

(SEQ ID NO: 507)

UAAAAGGUAUAGAGUUCAAG;

(SEQ ID NO: 508)

UAAAUCAUGCAAGUGACCUA;
or

(SEQ ID NO: 509)

UAAGAUAACUACAAAGGGUC.

[0050] In an embodiment, when two or more gRNAs are used to position two or more breaks, e.g., two or more single stranded breaks in the target nucleic acid sequence, each guide RNA is independently selected from one of Tables 8A-8D. In an embodiment, when two or more gRNAs are used to position four breaks, e.g., four single strand breaks in the target nucleic acid sequence, each guide RNA is independently selected from one of Tables 8A-8D.

[0051] In an embodiment, the LCA10 target position in the CEP290 gene is targeted. In an embodiment, the targeting domain comprises a sequence that is the same as, or differs by no more than 1, 2, 3, 4, or 5 nucleotides from, a targeting domain sequence from Table 5A-5D. In some embodiments, the targeting domain is selected from those in Table 5A-5D. For example, in certain embodiments, the targeting domain is:

(SEQ ID NO: 510)

GAAUCCUGAAAGCUACU.

[0052] In an embodiment, when two or more gRNAs are used to position two or more breaks, e.g., two or more single stranded breaks in the target nucleic acid sequence, each guide RNA is independently selected from one of Tables 5A-5D. In an embodiment, when two or more gRNAs are used to position four breaks, e.g., four single strand breaks in the target nucleic acid sequence, each guide RNA is independently selected from one of Tables 5A-5D.

[0053] In an embodiment, the LCA10 target position in the CEP290 gene is targeted. In an embodiment, the targeting domain comprises a sequence that is the same as, or differs by no more than 1, 2, 3, 4, or 5 nucleotides from, a targeting domain sequence from Tables 9A-9E. In some embodiments, the targeting domain is selected from those in Tables 9A-9E. For example, in certain embodiments, the targeting domain is:

(SEQ ID NO: 460)

GAUGCAGAACUAGUGUAGAC;

(SEQ ID NO: 468)

GAAUAGUUUGUUCUGGGUAC;

(SEQ ID NO: 480)

GCCUGAACAAGUUUUGAAAC;

(SEQ ID NO: 494)

GGUCCCUGGCUUUUGUUCCU;

(SEQ ID NO: 497)

GUAAGACUGGAGAUAGAGAC;

(SEQ ID NO: 511)

GCUAAAUCAUGCAAGUGACCUAAG;

(SEQ ID NO: 512)

GGUCACUUGCAUGAUUUAG;

(SEQ ID NO: 513)

GUCACUUGCAUGAUUUAG;

(SEQ ID NO: 514)

GCCUAGGACUUUCUAAUGCUGGA;

(SEQ ID NO: 515)

GGACUUUCUAAUGCUGGA;

(SEQ ID NO: 516)

GGGACCAUGGGAGAAUAGUUUGUU;

(SEQ ID NO: 517)

GGACCAUGGGAGAAUAGUUUGUU;

(SEQ ID NO: 518)

GACCAUGGGAGAAUAGUUUGUU;

(SEQ ID NO: 519)

GGUCCCUGGCUUUUGUUCCUUGGA;

(SEQ ID NO: 520)

GUCCCUGGCUUUUGUUCCUUGGA;

(SEQ ID NO: 521)

GAAAACGUUGUUCUGAGUAGCUUU;

(SEQ ID NO: 522)

GUUGUUCUGAGUAGCUUU;

(SEQ ID NO: 523)

GUCCCUGGCUUUUGUUCCU;

(SEQ ID NO: 524)

GACAUCUUGUGGAUAAUGUAUCA;

(SEQ ID NO: 525)

GUCCUAGGCAAGAGACAUCUU;

(SEQ ID NO: 526)

GCCAGCAAAAGCUUUUGAGCUAA;

(SEQ ID NO: 527)

GCAAAAGCUUUUGAGCUAA;

(SEQ ID NO: 528)

GAUCUUAUUCUACUCCUGUGA;

(SEQ ID NO: 529)

GCUUUCAGGAUUCCUACUAAAUU;

(SEQ ID NO: 530)

GUUCUGUCCUCAGUAAAAGGUA;

(SEQ ID NO: 531)

GAACAACGUUUUCAUUUA;

(SEQ ID NO: 532)

GUAGAAUAUCAUAAGUUACAAUCU;

(SEQ ID NO: 533)

GAAUAUCAUAAGUUACAAUCU;

(SEQ ID NO: 534)

GUGGCUGUAAGAUAACUACA;

(SEQ ID NO: 535)

GGCUGUAAGAUAACUACA;

(SEQ ID NO: 536)

GUUUAACGUUAUCAUUUUCCCA;

(SEQ ID NO: 537)

GUAAGAGAAAGGGAUGGGCACUUA;

(SEQ ID NO: 538)

GAGAAAGGGAUGGGCACUUA;

(SEQ ID NO: 539)

GAAAGGGAUGGGCACUUA;

(SEQ ID NO: 540)

GUAAAUGAAAACGUUGUU;

(SEQ ID NO: 541)

GAUAAACAUGACUCAUAAUUUAGU;

(SEQ ID NO: 542)

GGAACAAAAGCCAGGGACCAUGG;

(SEQ ID NO: 543)

GAACAAAAGCCAGGGACCAUGG;

(SEQ ID NO: 544)

GGGAGAAUAGUUUGUUCUGGGUAC;

(SEQ ID NO: 545)

GGAGAAUAGUUUGUUCUGGGUAC;

(SEQ ID NO: 546)

GAGAAUAGUUUGUUCUGGGUAC;

(SEQ ID NO: 547)

GAAAUAGAGGCUUAUGGAUU;

(SEQ ID NO: 548)

GUUCUGGGUACAGGGGUAAGAGAA;

(SEQ ID NO: 549)

GGGUACAGGGGUAAGAGAA;

(SEQ ID NO: 550)

GGUACAGGGGUAAGAGAA;

(SEQ ID NO: 551)

GUAAAUUCUCAUCAUUUUUUAUUG;

(SEQ ID NO: 552)

GGAGAGGAUAGGACAGAGGACAUG;

(SEQ ID NO: 553)

GAGAGGAUAGGACAGAGGACAUG;

(SEQ ID NO: 554)

GAGGAUAGGACAGAGGACAUG;

(SEQ ID NO: 555)

GGAUAGGACAGAGGACAUG;

(SEQ ID NO: 556)

GAUAGGACAGAGGACAUG;

(SEQ ID NO: 557)

GAAUAAAUGUAGAAUUUUAAUG;

(SEQ ID NO: 558)

GUCAAAAGCUACCGGUUACCUG;

(SEQ ID NO: 559)

GUUUUUAAGGCGGGGAGUCACAU;

(SEQ ID NO: 560)

GUCUUACAUCCUCCUUACUGCCAC;

(SEQ ID NO: 561)

GAGUCACAGGGUAGGAUUCAUGUU;

(SEQ ID NO: 562)

GUCACAGGGUAGGAUUCAUGUU;

(SEQ ID NO: 563)

GGCACAGAGUUCAAGCUAAUACAU;

(SEQ ID NO: 564)

GCACAGAGUUCAAGCUAAUACAU;

(SEQ ID NO: 565)

GAGUUCAAGCUAAUACAU;

(SEQ ID NO: 566)

GUGUUGAGUAUCUCCUGUUUGGCA;

(SEQ ID NO: 567)

GUUGAGUAUCUCCUGUUUGGCA;

(SEQ ID NO: 568)

GAGUAUCUCCUGUUUGGCA;

(SEQ ID NO: 569)

GAAAAUCAGAUUUCAUGUGUG;

(SEQ ID NO: 570)

GCCACAAGAAUGAUCAUUCUAAAC;

(SEQ ID NO: 571)

GGCGGGGAGUCACAUGGGAGUCA;

(SEQ ID NO: 572)

GCGGGGAGUCACAUGGGAGUCA;

(SEQ ID NO: 573)

GGGGAGUCACAUGGGAGUCA;

(SEQ ID NO: 574)

GGGAGUCACAUGGGAGUCA;

(SEQ ID NO: 575)

GGAGUCACAUGGGAGUCA;

(SEQ ID NO: 576)

GCUUUUGACAGUUUUUAAGGCG;

(SEQ ID NO: 577)

GAUCAUUCUUGUGGCAGUAAG;

(SEQ ID NO: 578)

GAGCAAGAGAUGAACUAG;

(SEQ ID NO: 579)

GUAGAUUGAGGUAGAAUCAAGAA;

(SEQ ID NO: 580)

GAUUGAGGUAGAAUCAAGAA;

(SEQ ID NO: 581)

GGAUGUAAGACUGGAGAUAGAGAC;

(SEQ ID NO: 582)

GAUGUAAGACUGGAGAUAGAGAC;

(SEQ ID NO: 583)

GGGAGUCACAUGGGAGUCACAGGG;

(SEQ ID NO: 584)

GGAGUCACAUGGGAGUCACAGGG;

(SEQ ID NO: 585)

GAGUCACAUGGGAGUCACAGGG;

(SEQ ID NO: 586)

GUCACAUGGGAGUCACAGGG;

(SEQ ID NO: 587)

GUUUACAUAUCUGUCUUCCUUAA;
or

(SEQ ID NO: 588)

GAUUUCAUGUGUGAAGAA.

[0054] In an embodiment, when two or more gRNAs are used to position two or more breaks, e.g., two or more single stranded breaks in the target nucleic acid sequence, each guide RNA is independently selected from one of Tables 9A-9E. In an embodiment, when two or more gRNAs are used to position four breaks, e.g., four single strand breaks in the target nucleic acid sequence, each guide RNA is independently selected from one of Tables 9A-9E.

[0055] In an embodiment, the LCA10 target position in the CEP290 gene is targeted. In an embodiment, the targeting domain comprises a sequence that is the same as, or differs by no more than 1, 2, 3, 4, or 5 nucleotides from, a targeting domain sequence from Tables 6A-6B. In some embodiments, the targeting domain is selected from those in Tables 6A-6B. For example, in certain embodiments, the targeting domain is:

(SEQ ID NO: 589)

GAGUUCAAGCUAAUACAUGA;

(SEQ ID NO: 590)

GUUGUUCUGAGUAGCUU;
or

(SEQ ID NO: 591)

GGCAAAAGCAGCAGAAAGCA.

[0056] In an embodiment, when two or more gRNAs are used to position two or more breaks, e.g., two or more single stranded breaks in the target nucleic acid sequence, each guide RNA is independently selected from one of Tables 6A-6B. In an embodiment, when two or more gRNAs are used to position four breaks, e.g., four single strand breaks in the target nucleic acid sequence, each guide RNA is independently selected from one of Tables 6A-6B.

[0057] In an embodiment, the LCA10 target position in the CEP290 gene is targeted. In an embodiment, the targeting domain comprises a sequence that is the same as, or differs by no more than 1, 2, 3, 4, or 5 nucleotides from, a targeting domain sequence from Tables 10A-10B. In some embodiments, the targeting domain is selected from those in Tables 10A-10B. For example, in certain embodiments, the targeting domain is:

(SEQ ID NO: 589)

GAGUUCAAGCUAAUACAUGA;

(SEQ ID NO: 590)

GUUGUUCUGAGUAGCUU;

(SEQ ID NO: 591)

GGCAAAAGCAGCAGAAAGCA;

(SEQ ID NO: 592)

GUGGCUGAAUGACUUCU;
or

(SEQ ID NO: 593)

GACUAGAGGUCACGAAA.

[0058] In an embodiment, when two or more gRNAs are used to position two or more breaks, e.g., two or more single stranded breaks in the target nucleic acid sequence, each guide RNA is independently selected from one of Tables 10A-10B. In an embodiment, when two or more gRNAs are used to position four breaks, e.g., four single strand breaks in the target nucleic acid sequence, each guide RNA is independently selected from one of Tables 10A-10B.

[0059] In an embodiment, the gRNA, e.g., a gRNA comprising a targeting domain, which is complementary with a target domain from the CEP290 gene, is a modular gRNA. In other embodiments, the gRNA is a chimeric gRNA.

[0060] In an embodiment, when two gRNAs are used to position two breaks, e.g., two single strand breaks, in the target nucleic acid sequence, each guide RNA is independently selected from one or more of Tables 2A-2D, Tables 3A-3C, Tables 4A-4D, Tables 5A-5D, Tables 6A-6B, Tables 7A-7D, Tables 8A-8D, Tables 9A-9E, Tables 10A-10B, or Table 11.

[0061] In an embodiment, the targeting domain which is complementary with a target domain from the CEP290 gene comprises 16 or more nucleotides in length. In an embodiment, the targeting domain which is complementary with a target domain from the CEP290 gene is 16 nucleotides or more in length. In an embodiment, the targeting domain is 16 nucleotides in length. In an embodiment, the targeting domain is 17 nucleotides in length. In an embodiment, the targeting domain is 18 nucleotides in length. In an embodiment, the targeting domain is 19 nucleotides in length. In an embodiment, the targeting domain is 20 nucleotides in length. In an embodiment, the targeting domain is 21 nucleotides in length. In an embodiment, the targeting domain is 22 nucleotides in length. In an embodiment, the targeting domain is 23 nucleotides in length. In an embodiment, the targeting domain is 24 nucleotides in length. In an embodiment, the targeting domain is 25 nucleotides in length. In an embodiment, the targeting domain is 26 nucleotides in length.

[0062] In an embodiment, the targeting domain comprises 16 nucleotides.

[0063] In an embodiment, the targeting domain comprises 17 nucleotides.

[0064] In an embodiment, the targeting domain comprises 18 nucleotides.

[0065] In an embodiment, the targeting domain comprises 19 nucleotides.

[0066] In an embodiment, the targeting domain comprises 20 nucleotides.

[0067] In an embodiment, the targeting domain comprises 21 nucleotides.

[0068] In an embodiment, the targeting domain comprises 22 nucleotides.

[0069] In an embodiment, the targeting domain comprises 23 nucleotides.

[0070] In an embodiment, the targeting domain comprises 24 nucleotides.

[0071] In an embodiment, the targeting domain comprises 25 nucleotides.

[0072] In an embodiment, the targeting domain comprises 26 nucleotides.

[0073] A gRNA as described herein may comprise from 5′ to 3′: a targeting domain (comprising a “core domain”, and optionally a “secondary domain”); a first complementarity domain; a linking domain; a second complementarity domain; a proximal domain; and a tail domain. In some embodiments, the proximal domain and tail domain are taken together as a single domain.

[0074] In an embodiment, a gRNA comprises a linking domain of no more than 25 nucleotides in length; a proximal and tail domain, that taken together, are at least 20 nucleotides in length; and a targeting domain of equal to or greater than 16, 17, 18, 19, 20, 21, 22, 23, 24, 25 or 26 nucleotides in length.

[0075] In another embodiment, a gRNA comprises a linking domain of no more than 25 nucleotides in length; a proximal and tail domain, that taken together, are at least 30 nucleotides in length; and a targeting domain of equal to or greater than 16, 17, 18, 19, 20, 21, 22, 23, 24, 25 or 26 nucleotides in length.

[0076] In another embodiment, a gRNA comprises a linking domain of no more than 25 nucleotides in length; a proximal and tail domain, that taken together, are at least 30 nucleotides in length; and a targeting domain of equal to or greater than 16, 17, 18, 19, 20, 21, 22, 23, 24, 25 or 26 nucleotides in length.

[0077] In another embodiment, a gRNA comprises a linking domain of no more than 25 nucleotides in length; a proximal and tail domain, that taken together, are at least 40 nucleotides in length; and a targeting domain of equal to or greater than 16, 17, 18, 19, 20, 21, 22, 23, 24, 25 or 26 nucleotides in length.

[0078] A cleavage event, e.g., a double strand or single strand break, is generated by a Cas9 molecule. The Cas9 molecule may be an enzymatically active Cas9 (eaCas9) molecule, e.g., an eaCas9 molecule that forms a double strand break in a target nucleic acid or an eaCas9 molecule forms a single strand break in a target nucleic acid (e.g., a nickase molecule).

[0079] In an embodiment, the eaCas9 molecule catalyzes a double strand break.

[0080] In some embodiments, the eaCas9 molecule comprises HNH-like domain cleavage activity but has no, or no significant, N-terminal RuvC-like domain cleavage activity. In this case, the eaCas9 molecule is an HNH-like domain nickase, e.g., the eaCas9 molecule comprises a mutation at D10, e.g., D10A. In other embodiments, the eaCas9 molecule comprises N-terminal RuvC-like domain cleavage activity but has no, or no significant, HNH-like domain cleavage activity. In an embodiment, the eaCas9 molecule is an N-terminal RuvC-like domain nickase, e.g., the eaCas9 molecule comprises a mutation at H840, e.g., H840A. In an embodiment, the eaCas9 molecule is an N-terminal RuvC-like domain nickase, e.g., the eaCas9 molecule comprises a mutation at H863, e.g., H863A.

[0081] In an embodiment, a single strand break is formed in the strand of the target nucleic acid to which the targeting domain of said gRNA is complementary. In another embodiment, a single strand break is formed in the strand of the target nucleic acid other than the strand to which the targeting domain of said gRNA is complementary.

[0082] In another aspect, disclosed herein is a nucleic acid, e.g., an isolated or non-naturally occurring nucleic acid, e.g., DNA, that comprises (a) a sequence that encodes a gRNA molecule comprising a targeting domain that is complementary with a target domain in CEP290 gene as disclosed herein.

[0083] In an embodiment, the nucleic acid encodes a gRNA molecule, e.g., the first gRNA molecule, comprising a targeting domain comprising a sequence that is the same as, or differs by no more than 1, 2, 3, 4, or 5 nucleotides from, a targeting domain sequence from any one of Tables 2A-2D, Tables 3A-3C, Tables 4A-4D, Tables 5A-5D, Tables 6A-6B, Tables 7A-7D, Tables 8A-8D, Tables 9A-9E, Tables 10A-10B, or Table 11. In an embodiment, the nucleic acid encodes a gRNA molecule comprising a targeting domain that is selected from those in Tables 2A-2D, Tables 3A-3C, Tables 4A-4D, Tables 5A-5D, Tables 6A-6B, Tables 7A-7D, Tables 8A-8D, Tables 9A-9E, Tables 10A-10B, or Table 11.

[0084] In an embodiment, the nucleic acid encodes a modular gRNA, e.g., one or more nucleic acids encode a modular gRNA. In other embodiments, the nucleic acid encodes a chimeric gRNA. The nucleic acid may encode a gRNA, e.g., the first gRNA molecule, comprising a targeting domain comprising 16 nucleotides or more in length. In one embodiment, the nucleic acid encodes a gRNA, e.g., the first gRNA molecule, comprising a targeting domain that is 16 nucleotides in length. In other embodiments, the nucleic acid encodes a gRNA, e.g., the first gRNA molecule, comprising a targeting domain that is 17 nucleotides in length. In still other embodiments, the nucleic acid encodes a gRNA, e.g., the first gRNA molecule, comprising a targeting domain that is 18 nucleotides in length. In still other embodiments, the nucleic acid encodes a gRNA, e.g., the first gRNA molecule, comprising a targeting domain that is 19 nucleotides in length. In still other embodiments, the nucleic acid encodes a gRNA, e.g., the first gRNA molecule, comprising a targeting domain that is 20 nucleotides in length. In still other embodiments, the nucleic acid encodes a gRNA, e.g., the first gRNA molecule, comprising a targeting domain that is 21 nucleotides in length. In still other embodiments, the nucleic acid encodes a gRNA, e.g., the first gRNA molecule, comprising a targeting domain that is 22 nucleotides in length. In still other embodiments, the nucleic acid encodes a gRNA, e.g., the first gRNA molecule, comprising a targeting domain that is 23 nucleotides in length. In still other embodiments, the nucleic acid encodes a gRNA, e.g., the first gRNA molecule, comprising a targeting domain that is 24 nucleotides in length. In still other embodiments, the nucleic acid encodes a gRNA, e.g., the first gRNA molecule, comprising a targeting domain that is 25 nucleotides in length. In still other embodiments, the nucleic acid encodes a gRNA, e.g., the first gRNA molecule, comprising a targeting domain that is 26 nucleotides in length.

[0085] In an embodiment, a nucleic acid encodes a gRNA comprising from 5′ to 3′: a targeting domain (comprising a “core domain”, and optionally a “secondary domain”); a first complementarity domain; a linking domain; a second complementarity domain; a proximal domain; and a tail domain. In some embodiments, the proximal domain and tail domain are taken together as a single domain.

[0086] In an embodiment, a nucleic acid encodes a gRNA e.g., the first gRNA molecule, comprising a linking domain of no more than 25 nucleotides in length; a proximal and tail domain, that taken together, are at least 20 nucleotides in length; and a targeting domain of equal to or greater than 16, 17, 18, 19, 20, 21, 22, 23, 24, 25 or 26 nucleotides in length.

[0087] In an embodiment, a nucleic acid encodes a gRNA e.g., the first gRNA molecule, comprising a linking domain of no more than 25 nucleotides in length; a proximal and tail domain, that taken together, are at least 30 nucleotides in length; and a targeting domain of equal to or greater than 16, 17, 18, 19, 20, 21, 22, 23, 24, 25 or 26 nucleotides in length.

[0088] In an embodiment, a nucleic acid encodes a gRNA e.g., the first gRNA molecule, comprising a linking domain of no more than 25 nucleotides in length; a proximal and tail domain, that taken together, are at least 30 nucleotides in length; and a targeting domain of equal to or greater than 16, 17, 18, 19, 20, 21, 22, 23, 24, 25 or 26 nucleotides in length.

[0089] In an embodiment, a nucleic acid encodes a gRNA comprising e.g., the first gRNA molecule, a linking domain of no more than 25 nucleotides in length; a proximal and tail domain, that taken together, are at least 40 nucleotides in length; and a targeting domain of equal to or greater than 16, 17, 18, 19, 20, 21, 22, 23, 24, 25 or 26 nucleotides in length.

[0090] In an embodiment, a nucleic acid comprises (a) a sequence that encodes a gRNA molecule comprising a targeting domain that is complementary with a target domain in the CEP290 gene as disclosed herein, and further comprises (b) a sequence that encodes a Cas9 molecule.

[0091] The Cas9 molecule may be a nickase molecule, a enzymatically activating Cas9 (eaCas9) molecule, e.g., an eaCas9 molecule that forms a double strand break in a target nucleic acid and an eaCas9 molecule forms a single strand break in a target nucleic acid. In an embodiment, a single strand break is formed in the strand of the target nucleic acid to which the targeting domain of said gRNA is complementary. In another embodiment, a single strand break is formed in the strand of the target nucleic acid other than the strand to which the targeting domain of said gRNA is complementary.

[0092] In an embodiment, the eaCas9 molecule catalyzes a double strand break.

[0093] In some embodiments, the eaCas9 molecule comprises HNH-like domain cleavage activity but has no, or no significant, N-terminal RuvC-like domain cleavage activity. In other embodiments, the said eaCas9 molecule is an HNH-like domain nickase, e.g., the eaCas9 molecule comprises a mutation at D10, e.g., D10A. In other embodiments, the eaCas9 molecule comprises N-terminal RuvC-like domain cleavage activity but has no, or no significant, HNH-like domain cleavage activity. In another embodiment, the eaCas9 molecule is an N-terminal RuvC-like domain nickase, e.g., the eaCas9 molecule comprises a mutation at H840, e.g., H840A. In another embodiment, the eaCas9 molecule is an N-terminal RuvC-like domain nickase, e.g., the eaCas9 molecule comprises a mutation at H863, e.g., H863A.

[0094] A nucleic acid disclosed herein may comprise (a) a sequence that encodes a gRNA molecule comprising a targeting domain that is complementary with a target domain in the CEP290 gene as disclosed herein; and (b) a sequence that encodes a Cas9 molecule.

[0095] A nucleic acid disclosed herein may comprise (a) a sequence that encodes a gRNA molecule comprising a targeting domain that is complementary with a target domain in the CEP290 gene as disclosed herein; (b) a sequence that encodes a Cas9 molecule; and further comprises (c)(i) a sequence that encodes a second gRNA molecule described herein having a targeting domain that is complementary to a second target domain of the CEP290 gene, and optionally, (ii) a sequence that encodes a third gRNA molecule described herein having a targeting domain that is complementary to a third target domain of the CEP290 gene; and optionally, (iii) a sequence that encodes a fourth gRNA molecule described herein having a targeting domain that is complementary to a fourth target domain of the CEP290 gene.

[0096] In an embodiment, a nucleic acid encodes a second gRNA molecule comprising a targeting domain configured to provide a cleavage event, e.g., a double strand break or a single strand break, sufficiently close to a LCA10 target position in the CEP290 gene to allow alteration, e.g., alteration associated with NHEJ, of the LCA10 target position, either alone or in combination with the break positioned by said first gRNA molecule.

[0097] In an embodiment, a nucleic acid encodes a third gRNA molecule comprising a targeting domain configured to provide a cleavage event, e.g., a double strand break or a single strand break, sufficiently close to a LCA10 target position in the CEP290 gene to allow alteration, e.g., alteration associated with NHEJ, either alone or in combination with the break positioned by the first and/or second gRNA molecule.

[0098] In an embodiment, a nucleic acid encodes a fourth gRNA molecule comprising a targeting domain configured to provide a cleavage event, e.g., a double strand break or a single strand break, sufficiently close to a LCA10 target position in the CEP290 gene to allow alteration, e.g., alteration associated with NHEJ, either alone or in combination with the break positioned by the first gRNA molecule, the second gRNA molecule and/or the third gRNA molecule.

[0099] In an embodiment, a nucleic acid encodes a second gRNA molecule comprising a targeting domain configured to provide a cleavage event, e.g., a double strand break or a single strand break, in combination with the break position by said first gRNA molecule, sufficiently close to a LCA10 target position in the CEP290 gene to allow alteration, e.g., alteration associated with NHEJ, of the a LCA10 target position in the CEP290 gene, either alone or in combination with the break positioned by said first gRNA molecule.

[0100] In an embodiment, a nucleic acid encodes a third gRNA molecule comprising a targeting domain configured to provide a cleavage event, e.g., a double strand break or a single strand break, in combination with the break position by said first and/or second gRNA molecule sufficiently close to a LCA10 target position in the CEP290 gene to allow alteration, e.g., alteration associated with NHEJ, either alone or in combination with the break positioned by the first and/or second gRNA molecule.

[0101] In an embodiment, a nucleic acid encodes a fourth gRNA molecule comprising a targeting domain configured to provide a cleavage event, e.g., a double strand break or a single strand break, in combination with the break positioned by the first gRNA molecule, the second gRNA molecule and/or the third gRNA molecule, sufficiently close to a LCA10 target position in the CEP290 gene to allow alteration, e.g., alteration associated with NHEJ, either alone or in combination with the break positioned by the first gRNA molecule, the second gRNA molecule and/or the third gRNA molecule.

[0102] In an embodiment, the nucleic acid encodes a second gRNA molecule. The second gRNA is selected to target the LCA10 target position. Optionally, the nucleic acid may encode a third gRNA, and further optionally, the nucleic acid may encode a fourth gRNA molecule.

[0103] In an embodiment, the nucleic acid encodes a second gRNA molecule comprising a targeting domain comprising a sequence that is the same as, or differs by no more than 1, 2, 3, 4, or 5 nucleotides from, a targeting domain sequence from one of Tables 2A-2D, Tables 3A-3C, Tables 4A-4D, Tables 5A-5D, Tables 6A-6B, Tables 7A-7D, Tables 8A-8D, Tables 9A-9E, Tables 10A-10B, or Table 11. In an embodiment, the nucleic acid encodes a second gRNA molecule comprising a targeting domain selected from those in Tables 2A-2D, Tables 3A-3C, Tables 4A-4D, Tables 5A-5D, Tables 6A-6B, Tables 7A-7D, Tables 8A-8D, Tables 9A-9E, Tables 10A-10B, or Table 11. In an embodiment, when a third or fourth gRNA molecule are present, the third and fourth gRNA molecules may independently comprise a targeting domain comprising a sequence that is the same as, or differs by no more than 1, 2, 3, 4, or 5 nucleotides from, a targeting domain sequence from one of Tables 2A-2D, Tables 3A-3C, Tables 4A-4D, Tables 5A-5D, Tables 6A-6B, Tables 7A-7D, Tables 8A-8D, Tables 9A-9E, Tables 10A-10B, or Table 11. In a further embodiment, when a third or fourth gRNA molecule are present, the third and fourth gRNA molecules may independently comprise a targeting domain selected from those in Tables 2A-2D, Tables 3A-3C, Tables 4A-4D, Tables 5A-5D, Tables 6A-6B, Tables 7A-7D, Tables 8A-8D, Tables 9A-9E, Tables 10A-10B, or Table 11.

[0104] In an embodiment, the nucleic acid encodes a second gRNA which is a modular gRNA, e.g., wherein one or more nucleic acid molecules encode a modular gRNA. In other embodiments, the nucleic acid encoding a second gRNA is a chimeric gRNA. In other embodiments, when a nucleic acid encodes a third or fourth gRNA, the third and fourth gRNA may be a modular gRNA or a chimeric gRNA. When multiple gRNAs are used, any combination of modular or chimeric gRNAs may be used.

[0105] A nucleic acid may encode a second, a third, and/or a fourth gRNA, each independently, comprising a targeting domain comprising 16 nucleotides or more in length. In an embodiment, the nucleic acid encodes a second gRNA comprising a targeting domain that is 16 nucleotides in length. In other embodiments, the nucleic acid encodes a second gRNA comprising a targeting domain that is 17 nucleotides in length. In still other embodiments, the nucleic acid encodes a second gRNA comprising a targeting domain that is 18 nucleotides in length. In still other embodiments, the nucleic acid encodes a second gRNA comprising a targeting domain that is 19 nucleotides in length. In still other embodiments, the nucleic acid encodes a second gRNA comprising a targeting domain that is 20 nucleotides in length. In still other embodiments, the nucleic acid encodes a second gRNA comprising a targeting domain that is 21 nucleotides in length. In still other embodiments, the nucleic acid encodes a second gRNA comprising a targeting domain that is 22 nucleotides in length. In still other embodiments, the nucleic acid encodes a second gRNA comprising a targeting domain that is 23 nucleotides in length. In still other embodiments, the nucleic acid encodes a second gRNA comprising a targeting domain that is 24 nucleotides in length. In still other embodiments, the nucleic acid encodes a second gRNA comprising a targeting domain that is 25 nucleotides in length. In still other embodiments, the nucleic acid encodes a second gRNA comprising a targeting domain that is 26 nucleotides in length.

[0106] In an embodiment, the targeting domain comprises 16 nucleotides.

[0107] In an embodiment, the targeting domain comprises 17 nucleotides.

[0108] In an embodiment, the targeting domain comprises 18 nucleotides.

[0109] In an embodiment, the targeting domain comprises 19 nucleotides.

[0110] In an embodiment, the targeting domain comprises 20 nucleotides.

[0111] In an embodiment, the targeting domain comprises 21 nucleotides.

[0112] In an embodiment, the targeting domain comprises 22 nucleotides.

[0113] In an embodiment, the targeting domain comprises 23 nucleotides.

[0114] In an embodiment, the targeting domain comprises 24 nucleotides.

[0115] In an embodiment, the targeting domain comprises 25 nucleotides.

[0116] In an embodiment, the targeting domain comprises 26 nucleotides.

[0117] In an embodiment, a nucleic acid encodes a second, a third, and/or a fourth gRNA, each independently, comprising from 5′ to 3′: a targeting domain (comprising a “core domain”, and optionally a “secondary domain”); a first complementarity domain; a linking domain; a second complementarity domain; a proximal domain; and a tail domain. In some embodiments, the proximal domain and tail domain are taken together as a single domain.

[0118] In an embodiment, a nucleic acid encodes a second, a third, and/or a fourth gRNA, each independently, comprising a linking domain of no more than 25 nucleotides in length; a proximal and tail domain, that taken together, are at least 20 nucleotides in length; and a targeting domain of equal to or greater than 16, 17, 18, 19, 20, 21, 22, 23, 24, 25 or 26 nucleotides in length.

[0119] In an embodiment, a nucleic acid encodes a second, a third, and/or a fourth gRNA, each independently, comprising a linking domain of no more than 25 nucleotides in length; a proximal and tail domain, that taken together, are at least 30 nucleotides in length; and a targeting domain of equal to or greater than 16, 17, 18, 19, 20, 21, 22, 23, 24, 25 or 26 nucleotides in length.

[0120] In an embodiment, a nucleic acid encodes a second, a third, and/or a fourth gRNA, each independently, comprising a linking domain of no more than 25 nucleotides in length; a proximal and tail domain, that taken together, are at least 30 nucleotides in length; and a targeting domain of equal to or greater than 16, 17, 18, 19, 20, 21, 22, 23, 24, 25 or 26 nucleotides in length.

[0121] In an embodiment, a nucleic acid encodes a second, a third, and/or a fourth gRNA, each independently, comprising a linking domain of no more than 25 nucleotides in length; a proximal and tail domain, that taken together, are at least 40 nucleotides in length; and a targeting domain of equal to or greater than 16, 17, 18, 19, 20, 21, 22, 23, 24, 25 or 26 nucleotides in length.

[0122] In some embodiments, when the CEP290 gene is altered, e.g., by NHEJ, the nucleic acid encodes (a) a sequence that encodes a gRNA molecule comprising a targeting domain that is complementary with a target domain in the CEP290 gene as disclosed herein; (b) a sequence that encodes a Cas9 molecule; optionally, (c)(i) a sequence that encodes a second gRNA molecule described herein having a targeting domain that is complementary to a second target domain of the CEP290 gene, and further optionally, (ii) a sequence that encodes a third gRNA molecule described herein having a targeting domain that is complementary to a third target domain of the CEP290 gene; and still further optionally, (iii) a sequence that encodes a fourth gRNA molecule described herein having a targeting domain that is complementary to a fourth target domain of the CEP290 gene.

[0123] As described above, a nucleic acid may comprise (a) a sequence encoding a gRNA molecule comprising a targeting domain that is complementary with a target domain in the CEP290, and (b) a sequence encoding a Cas9 molecule. In some embodiments, (a) and (b) are present on the same nucleic acid molecule, e.g., the same vector, e.g., the same viral vector, e.g., the same adeno-associated virus (AAV) vector. In an embodiment, the nucleic acid molecule is an AAV vector, e.g., an AAV vector described herein. Exemplary AAV vectors that may be used in any of the described compositions and methods include an AAV1 vector, a modified AAV1 vector, an AAV2 vector, a modified AAV2 vector, an AAV3 vector, a modified AAV3 vector, an AAV4 vector, a modified AAV4 vector, an AAV5 vector, a modified AAV5 vector, an AAV6 vector, a modified AAV6 vector, an AAV7 vector, a modified AAV7 vector, an AAV8 vector, an AAV9 vector, an AAV.rh10 vector, a modified AAV.rh10 vector, an AAV.rh32/33 vector, a modified AAV.rh32/33 vector, an AAV.rh43 vector, a modified AAV.rh43 vector, an AAV.rh64R1 vector, and a modified AAV.rh64R1 vector.

[0124] In other embodiments, (a) is present on a first nucleic acid molecule, e.g. a first vector, e.g., a first viral vector, e.g., a first AAV vector; and (b) is present on a second nucleic acid molecule, e.g., a second vector, e.g., a second vector, e.g., a second AAV vector. The first and second nucleic acid molecules may be AAV vectors, e.g., the AAV vectors described herein.

[0125] In other embodiments, the nucleic acid may further comprise (c)(i) a sequence that encodes a second gRNA molecule as described herein. In some embodiments, the nucleic acid comprises (a), (b) and (c)(i). Each of (a) and (c)(i) may be present on the same nucleic acid molecule, e.g., the same vector, e.g., the same viral vector, e.g., the same adeno-associated virus (AAV) vector. In an embodiment, the nucleic acid molecule is an AAV vector, e.g., an AAV vectors described herein.

[0126] In other embodiments, (a) and (c)(i) are on different vectors. For example, (a) may be present on a first nucleic acid molecule, e.g. a first vector, e.g., a first viral vector, e.g., a first AAV vector; and (c)(i) may be present on a second nucleic acid molecule, e.g., a second vector, e.g., a second vector, e.g., a second AAV vector. In an embodiment, the first and second nucleic acid molecules are AAV vectors, e.g., the AAV vectors described herein.

[0127] In another embodiment, each of (a), (b), and (c)(i) are present on the same nucleic acid molecule, e.g., the same vector, e.g., the same viral vector, e.g., an AAV vector. In an embodiment, the nucleic acid molecule is an AAV vector. In an alternate embodiment, one of (a), (b), and (c)(i) is encoded on a first nucleic acid molecule, e.g., a first vector, e.g., a first viral vector, e.g., a first AAV vector; and a second and third of (a), (b), and (c)(i) is encoded on a second nucleic acid molecule, e.g., a second vector, e.g., a second vector, e.g., a second AAV vector. The first and second nucleic acid molecule may be AAV vectors, e.g., the AAV vectors described herein.

[0128] In an embodiment, (a) is present on a first nucleic acid molecule, e.g., a first vector, e.g., a first viral vector, a first AAV vector; and (b) and (c)(i) are present on a second nucleic acid molecule, e.g., a second vector, e.g., a second vector, e.g., a second AAV vector. The first and second nucleic acid molecule may be AAV vectors, e.g., the AAV vectors described herein.

[0129] In other embodiments, (b) is present on a first nucleic acid molecule, e.g., a first vector, e.g., a first viral vector, e.g., a first AAV vector; and (a) and (c)(i) are present on a second nucleic acid molecule, e.g., a second vector, e.g., a second vector, e.g., a second AAV vector. The first and second nucleic acid molecule may be AAV vectors, e.g., the AAV vectors described herein.

[0130] In other embodiments, (c)(i) is present on a first nucleic acid molecule, e.g., a first vector, e.g., a first viral vector, e.g., a first AAV vector; and (b) and (a) are present on a second nucleic acid molecule, e.g., a second vector, e.g., a second vector, e.g., a second AAV vector. The first and second nucleic acid molecule may be AAV vectors, e.g., the AAV vectors described herein.

[0131] In another embodiment, each of (a), (b) and (c)(i) are present on different nucleic acid molecules, e.g., different vectors, e.g., different viral vectors, e.g., different AAV vector. For example, (a) may be on a first nucleic acid molecule, (b) on a second nucleic acid molecule, and (c)(i) on a third nucleic acid molecule. The first, second and third nucleic acid molecule may be AAV vectors, e.g., the AAV vectors described herein.

[0132] In another embodiment, when a third and/or fourth gRNA molecule are present, each of (a), (b), (c)(i), (c) (ii) and (c)(iii) may be present on the same nucleic acid molecule, e.g., the same vector, e.g., the same viral vector, e.g., an AAV vector. In an embodiment, the nucleic acid molecule is an AAV vector, e.g., an AAV vector. In an alternate embodiment, each of (a), (b), (c)(i), (c)(ii) and (c)(iii) may be present on the different nucleic acid molecules, e.g., different vectors, e.g., the different viral vectors, e.g., different AAV vectors. In further embodiments, each of (a), (b), (c)(i), (c) (ii) and (c)(iii) may be present on more than one nucleic acid molecule, but fewer than five nucleic acid molecules, e.g., AAV vectors, e.g., the AAV vectors described herein.

[0133] The nucleic acids described herein may comprise a promoter operably linked to the sequence that encodes the gRNA molecule of (a), e.g., a promoter described herein, e.g., a promoter described in Table 20. The nucleic acid may further comprise a second promoter operably linked to the sequence that encodes the second, third and/or fourth gRNA molecule of (c), e.g., a promoter described herein. The promoter and second promoter differ from one another. In some embodiments, the promoter and second promoter are the same.

[0134] The nucleic acids described herein may further comprise a promoter operably linked to the sequence that encodes the Cas9 molecule of (b), e.g., a promoter described herein, e.g., a promoter described in Table 20.

[0135] In another aspect, disclosed herein is a composition comprising (a) a gRNA molecule comprising a targeting domain that is complementary with a target domain in the CEP290 gene, as described herein. The composition of (a) may further comprise (b) a Cas9 molecule, e.g., a Cas9 molecule as described herein. A composition of (a) and (b) may further comprise (c) a second, third and/or fourth gRNA molecule, e.g., a second, third and/or fourth gRNA molecule described herein.

[0136] In another aspect, methods and compositions discussed herein, provide for treating or delaying the onset or progression of LCA10 by altering the LCA10 target position in the CEP290 gene.

[0137] In another aspect, disclosed herein is a method of altering a cell, e.g., altering the structure, e.g., altering the sequence, of a target nucleic acid of a cell, comprising contacting said cell with: (a) a gRNA that targets the CEP290 gene, e.g., a gRNA as described herein; (b) a Cas9 molecule, e.g., a Cas9 molecule as described herein; and optionally, (c) a second, third and/or fourth gRNA that targets CEP290 gene, e.g., a gRNA as described herein.

[0138] In some embodiments, the method comprises contacting said cell with (a) and (b).

[0139] In some embodiments, the method comprises contacting said cell with (a), (b), and (c).

[0140] The gRNA of (a) may be selected from any of Tables 2A-2D, Tables 3A-3C, Tables 4A-4D, Tables 5A-5D, Tables 6A-6B, Tables 7A-7D, Tables 8A-8D, Tables 9A-9E, Tables 10A-10B, or Table 11, or a gRNA that differs by no more than 1, 2, 3, 4, or 5 nucleotides from, a targeting domain sequence from any of Tables 2A-2D, Tables 3A-3C, Tables 4A-4D, Tables 5A-5D, Tables 6A-6B, Tables 7A-7D, Tables 8A-8D, Tables 9A-9E, Tables 10A-10B, or Table 11. The gRNA of (c) may be selected from any of Tables 2A-2D, Tables 3A-3C, Tables 4A-4D, Tables 5A-5D, Tables 6A-6B, Tables 7A-7D, Tables 8A-8D, Tables 9A-9E, Tables 10A-10B, or Table 11, or a gRNA that differs by no more than 1, 2, 3, 4, or 5 nucleotides from, a targeting domain sequence from any of Tables 2A-2D, Tables 3A-3C, Tables 4A-4D, Tables 5A-5D, Tables 6A-6B, Tables 7A-7D, Tables 8A-8D, Tables 9A-9E, Tables 10A-10B, or Table 11.

[0141] In some embodiments, the method comprises contacting a cell from a subject suffering from or likely to develop LCA10. The cell may be from a subject having a mutation at a LCA10 target position.

[0142] In some embodiments, the cell being contacted in the disclosed method is a photoreceptor cell. The contacting may be performed ex vivo and the contacted cell may be returned to the subject's body after the contacting step. In other embodiments, the contacting step may be performed in vivo.

[0143] In some embodiments, the method of altering a cell as described herein comprises acquiring knowledge of the presence of a LCA10 target position in said cell, prior to the contacting step. Acquiring knowledge of the presence of a LCA10 target position in the cell may be by sequencing the CEP290 gene, or a portion of the CEP290 gene.

[0144] In some embodiments, the contacting step of the method comprises contacting the cell with a nucleic acid, e.g., a vector, e.g., an AAV vector, e.g., an AAV vector described herein, that expresses at least one of (a), (b), and (c). In some embodiments, the contacting step of the method comprises contacting the cell with a nucleic acid, e.g., a vector, e.g., an AAV vector, that expresses each of (a), (b), and (c). In another embodiment, the contacting step of the method comprises delivering to the cell a Cas9 molecule of (b) and a nucleic acid which encodes a gRNA (a) and optionally, a second gRNA (c)(i) (and further optionally, a third gRNA (c)(iv) and/or fourth gRNA (c)(iii)).

[0145] In an embodiment, contacting comprises contacting the cell with a nucleic acid, e.g., a vector, e.g., an AAV vector, e.g., an AAV1 vector, a modified AAV1 vector, an AAV2 vector, a modified AAV2 vector, an AAV3 vector, a modified AAV3 vector, an AAV4 vector, a modified AAV4 vector, an AAV5 vector, a modified AAV5 vector, an AAV6 vector, a modified AAV6 vector, an AAV7 vector, a modified AAV7 vector, an AAV8 vector, an AAV9 vector, an AAV.rh10 vector, a modified AAV.rh10 vector, an AAV.rh32/33 vector, a modified AAV.rh32/33 vector, an AAV.rh43 vector, a modified AAV.rh43 vector, an AAV.rh64R1 vector, and a modified AAV.rh64R1 vector, e.g., an AAV vector described herein.

[0146] In an embodiment, contacting comprises delivering to said cell said Cas9 molecule of (b), as a protein or an mRNA, and a nucleic acid which encodes and (a) and optionally (c).

[0147] In an embodiment, contacting comprises delivering to said cell said Cas9 molecule of (b), as a protein or an mRNA, said gRNA of (a), as an RNA, and optionally said second gRNA of (c), as an RNA.

[0148] In an embodiment, contacting comprises delivering to said cell said gRNA of (a) as an RNA, optionally said second gRNA of (c) as an RNA, and a nucleic acid that encodes the Cas9 molecule of (b).

[0149] In another aspect, disclosed herein is a method of treating, or preventing a subject suffering from developing, LCA10, e.g., by altering the structure, e.g., sequence, of a target nucleic acid of the subject, comprising contacting the subject (or a cell from the subject) with:

[0150] (a) a gRNA that targets the CEP290 gene, e.g., a gRNA disclosed herein;

[0151] (b) a Cas9 molecule, e.g., a Cas9 molecule disclosed herein; and

[0152] optionally, (c)(i) a second gRNA that targets the CEP290 gene, e.g., a second gRNA disclosed herein, and

[0153] further optionally, (c)(ii) a third gRNA, and still further optionally, (c)(iii) a fourth gRNA that target the CEP290, e.g., a third and fourth gRNA disclosed herein.

[0154] In some embodiments, contacting comprises contacting with (a) and (b).

[0155] In some embodiments, contacting comprises contacting with (a), (b), and (c)(i).

[0156] In some embodiments, contacting comprises contacting with (a), (b), (c)(i) and (c)(ii).

[0157] In some embodiments, contacting comprises contacting with (a), (b), (c)(i), (c)(ii) and (c)(iii).

[0158] The gRNA of (a) or (c) (e.g., (c)(i), (c)(ii), or (c)(iii)) may be independently selected from any of Tables 2A-2D, Tables 3A-3C, Tables 4A-4D, Tables 5A-5D, Tables 6A-6B, Tables 7A-7D, Tables 8A-8D, Tables 9A-9E, Tables 10A-10B, or Table 11, or a gRNA that differs by no more than 1, 2, 3, 4, or 5 nucleotides from, a targeting domain sequence from any of Tables 2A-2D, Tables 3A-3C, Tables 4A-4D, Tables 5A-5D, Tables 6A-6B, Tables 7A-7D, Tables 8A-8D, Tables 9A-9E, Tables 10A-10B, or Table 11.

[0159] In an embodiment, said subject is suffering from, or likely to develop LCA10. In an embodiment, said subject has a mutation at a LCA10 target position.

[0160] In an embodiment, the method comprises acquiring knowledge of the presence of a mutation at a LCA10 target position in said subject.

[0161] In an embodiment, the method comprises acquiring knowledge of the presence of a mutation a LCA10 target position in said subject by sequencing the CEP290 gene or a portion of the CEP290 gene.

[0162] In an embodiment, the method comprises altering the LCA10 target position in the CEP290 gene.

[0163] In an embodiment, a cell of said subject is contacted ex vivo with (a), (b) and optionally (c). In an embodiment, said cell is returned to the subject's body.

[0164] In an embodiment, the method comprises introducing a cell into said subject's body, wherein said cell subject was contacted ex vivo with (a), (b) and optionally (c).

[0165] In an embodiment, the method comprises said contacting is performed in vivo. In an embodiment, the method comprises sub-retinal delivery. In an embodiment, contacting comprises sub-retinal injection. In an embodiment, contacting comprises intra-vitreal injection.

[0166] In an embodiment, contacting comprises contacting the subject with a nucleic acid, e.g., a vector, e.g., an AAV vector described herein, e.g., a nucleic acid that encodes at least one of (a), (b), and optionally (c).

[0167] In an embodiment, contacting comprises delivering to said subject said Cas9 molecule of (b), as a protein or mRNA, and a nucleic acid which encodes and (a) and optionally (c).

[0168] In an embodiment, contacting comprises delivering to said subject said Cas9 molecule of (b), as a protein or mRNA, said gRNA of (a), as an RNA, and optionally said second gRNA of (c), as an RNA.

[0169] In an embodiment, contacting comprises delivering to said subject said gRNA of (a), as an RNA, optionally said second gRNA of (c), as an RNA, and a nucleic acid that encodes the Cas9 molecule of (b).

[0170] In another aspect, disclosed herein is a reaction mixture comprising a gRNA, a nucleic acid, or a composition described herein, and a cell, e.g., a cell from a subject having, or likely to develop LCA10, or a subject having a mutation at a LCA10 target position.

[0171] In another aspect, disclosed herein is a kit comprising, (a) a gRNA molecule described herein, or a nucleic acid that encodes said gRNA, and one or more of the following:

[0172] (b) a Cas9 molecule, e.g., a Cas9 molecule described herein, or a nucleic acid or mRNA that encodes the Cas9;

[0173] (c)(i) a second gRNA molecule, e.g., a second gRNA molecule described herein or a nucleic acid that encodes (c)(i);

[0174] (c)(ii) a third gRNA molecule, e.g., a second gRNA molecule described herein or a nucleic acid that encodes (c)(ii); or

[0175] (c)(iii) a fourth gRNA molecule, e.g., a second gRNA molecule described herein or a nucleic acid that encodes (c)(iii).

[0176] In an embodiment, the kit comprises nucleic acid, e.g., an AAV vector, e.g., an AAV vector described herein, that encodes one or more of (a), (b), (c)(i), (c)(ii), and (c)(iii). In an embodiment, the kit further comprises a governing gRNA molecule, or a nucleic acid that encodes a governing gRNA molecule.

[0177] In yet another aspect, disclosed herein is a gRNA molecule, e.g., a gRNA molecule described herein, for use in treating LCA10 in a subject, e.g., in accordance with a method of treating LCA10 as described herein.

[0178] In an embodiment, the gRNA molecule in used in combination with a Cas9 molecule, e.g., a Cas9 molecule described herein. Additionally or alternatively, in an embodiment, the gRNA molecule is used in combination with a second, third and/or fourth gRNA molecule, e.g., a second, third and/or fourth gRNA molecule described herein.

[0179] In still another aspect, disclosed herein is use of a gRNA molecule, e.g., a gRNA molecule described herein, in the manufacture of a medicament for treating LCA10 in a subject, e.g., in accordance with a method of treating LCA10 as described herein.

[0180] In an embodiment, the medicament comprises a Cas9 molecule, e.g., a Cas9 molecule described herein. Additionally or alternatively, in an embodiment, the medicament comprises a second, third and/or fourth gRNA molecule, e.g., a second, third and/or fourth gRNA molecule described herein.

[0181] In one aspect, disclosed herein is a recombinant adenovirus-associated virus (AAV) genome comprising the following components:

[chemical structure]

[0182] wherein the left ITR component comprises, or consists of, a nucleotide sequence that is the same as, differs by no more than 1, 2, 3, 4, 5, 6, 7, 8, 9, or 10 nucleotides from, or has at least 90%, 92%, 94%, 96%, 98%, or 99% homology with, any of the left ITR nucleotide sequences disclosed in Table 25, or any of the nucleotide sequences of SEQ ID NOs: 407-415;

[0183] wherein the spacer 1 component comprises, or consists of, a nucleotide sequence having 0 to 150 nucleotides in length, e.g., SEQ ID NO: 416;

[0184] wherein the PIII promoter component comprises, or consists of, an RNA polymerase III promoter sequence;

[0185] wherein the gRNA component comprises a targeting domain and a scaffold domain,
[0186] wherein the targeting domain is 16-26 nucleotides in length, and comprises, or consists of, a targeting domain sequence disclosed herein, e.g., in any of Tables 2A-2D, Tables 3A-3C, Tables 4A-4D, Tables 5A-5D, Tables 6A-6B, Tables 7A-7D, Tables 8A-8D, Tables 9A-9E, Tables 10A-10B, or Table 11; and
[0187] wherein the scaffold domain (also referred to as a tracr domain in FIGS. 20A-25F) comprises, or consists of, a nucleotide sequence that is the same as, differs by no more than 1, 2, 3, 4, or 5 nucleotides from, or has at least has at least 90%, 92%, 94%, 96%, 98%, or 99% homology with, a nucleotide sequence of SEQ ID NO: 418;

[0188] wherein the spacer 2 component comprises, or consists of, a nucleotide sequence having 0 to 150 nucleotides in length e.g., SEQ ID NO: 419;

[0189] wherein the PII promoter component comprises, or consists of, a polymerase II promoter sequence, e.g., a constitutive or tissue specific promoter, e.g., a promoter disclosed in Table 20;

[0190] wherein the N-ter NLS component comprises, or consists of, a nucleotide sequence that is the same as, differs by no more than 1, 2, 3, 4, or 5 nucleotides from, or has at least has at least 90%, 92%, 94%, 96%, 98%, or 99% homology with, the nucleotide sequence of SEQ ID NO: 420 or a nucleotide sequence that encodes the amino acid sequence of SEQ ID NO: 434;

[0191] wherein the Cas9 component comprises, or consists of, a nucleotide sequence that is the same as, differs by no more than 1, 2, 3, 4, 5, 6, 7, 8, 9, or 10 nucleotides from, or has at least 90%, 92%, 94%, 96%, 98%, or 99% homology with, the nucleotide sequence of SEQ ID NO: 421 or a nucleotide sequence that encodes the amino acid sequence of SEQ ID NO: 26;

[0192] wherein the C-ter NLS component comprises, or consists of, a nucleotide sequence that is the same as, differs by no more than 1, 2, 3, 4, or 5 nucleotides from, or has at least has at least 90%, 92%, 94%, 96%, 98%, or 99% homology with, the nucleotide sequence of SEQ ID NO: 422 or a nucleotide sequence that encodes the amino acid sequence of SEQ ID NO: 434;

[0193] wherein the poly(A) signal component comprises, or consists of, a nucleotide sequence that is the same as, differs by no more than 1, 2, 3, 4, 5, 6, 7, 8, 9, or 10 nucleotides from, or has at least has at least 90%, 92%, 94%, 96%, 98%, or 99% homology with, any of the nucleotide sequences disclosed in Table 27, or any of the nucleotide sequences of SEQ ID NOs: 424, 455 or 456;

[0194] wherein the spacer 3 component comprises, or consists of, a nucleotide sequence having 0 to 150 nucleotides in length, e.g., SEQ ID NO: 425; and

[0195] wherein the right ITR component comprises, or consists of, a nucleotide sequence that is the same as, differs by no more than 1, 2, 3, 4, 5, 6, 7, 8, 9, or 10 nucleotides from, or has at least has at least 90%, 92%, 94%, 96%, 98%, or 99% homology with, any of the right ITR nucleotide sequences disclosed in Table 25, or any of the nucleotide sequences of SEQ ID NOs: 436-444.

[0196] In an embodiment, the left ITR component comprises, or consists of, a nucleotide sequence that is the same as any of the nucleotide sequences of SEQ ID NOs: 407-415.

[0197] In an embodiment, the spacer 1 component comprises, or consists of, a nucleotide sequence that is the same as the nucleotide sequence of SEQ ID NO: 416.

[0198] In an embodiment, the PIII promoter component is a U6 promoter component.

[0199] In an embodiment, the U6 promoter component comprises, or consists of, a nucleotide sequence that is the same as, differs by no more than 1, 2, 3, 4, 5, 6, 7, 8, 9, or 10 nucleotides from, or has at least has at least 90%, 92%, 94%, 96%, 98%, or 99% homology with, the nucleotide sequence of SEQ ID NO: 417;

[0200] In an embodiment, the U6 promoter component comprises, or consists of, a nucleotide sequence that is the same as the nucleotide sequence of SEQ ID NO: 417.

[0201] In an embodiment, the PIII promoter component is an H1 promoter component that comprises an H1 promoter sequence.

[0202] In an embodiment, the PIII promoter component is a tRNA promoter component that comprises a tRNA promoter sequence.

[0203] In an embodiment, the targeting domain comprises, or consists of, a nucleotide sequence that is the same as a nucleotide sequence selected from Table 11.

[0204] In an embodiment, the gRNA scaffold domain comprises, or consists of, a nucleotide sequence that is the same as the nucleotide sequence of SEQ ID NO: 418.

[0205] In an embodiment, the spacer 2 component comprises, or consists of, a nucleotide sequence that is the same as the nucleotide sequence of SEQ ID NO: 419;

[0206] In an embodiment, the PII promoter component is a CMV promoter component, and comprises, or consists of, a nucleotide sequence that is the same as, differs by no more than 1, 2, 3, 4, 5, 6, 7, 8, 9, or 10 nucleotides from, or has at least has at least 90%, 92%, 94%, 96%, 98%, or 99% homology with, the nucleotide sequence of SEQ ID NO: 401. In an embodiment, the PII promoter comprises, or consists of, a nucleotide sequence that is the same as the nucleotide sequence of SEQ ID NO: 401.

[0207] In an embodiment, the PII promoter component is an EFS promoter component, and comprises, or consists of, a nucleotide sequence that is the same as, differs by no more than 1, 2, 3, 4, 5, 6, 7, 8, 9, or 10 nucleotides from, or has at least has at least 90%, 92%, 94%, 96%, 98%, or 99% homology with, the nucleotide sequence of SEQ ID NO: 402. In an embodiment, the PII promoter comprises, or consists of, a nucleotide sequence that is the same as the nucleotide sequence of SEQ ID NO: 402.

[0208] In an embodiment, the PII promoter component is a GRK1 promoter (e.g., a human GRK1 promoter) component, and comprises, or consists of, a nucleotide sequence that is the same as, differs by no more than 1, 2, 3, 4, 5, 6, 7, 8, 9, or 10 nucleotides from, or has at least has at least 90%, 92%, 94%, 96%, 98%, or 99% homology with, the nucleotide sequence of SEQ ID NO: 403. In an embodiment, the PII promoter comprises, or consists of, a nucleotide sequence that is the same as the nucleotide sequence of SEQ ID NO: 403.

[0209] In an embodiment, the PII promoter component is a CRX promoter (e.g., a human CRX promoter) component, and comprises, or consists of, a nucleotide sequence that is the same as, differs by no more than 1, 2, 3, 4, 5, 6, 7, 8, 9, or 10 nucleotides from, or has at least has at least 90%, 92%, 94%, 96%, 98%, or 99% homology with, the nucleotide sequence of SEQ ID NO: 404. In an embodiment, the PII promoter comprises, or consists of, a nucleotide sequence that is the same as the nucleotide sequence of SEQ ID NO: 404.

[0210] In an embodiment, the PII promoter component is an NRL promoter (e.g., a human NRL promoter) component, and comprises, or consists of, a nucleotide sequence that is the same as, differs by no more than 1, 2, 3, 4, 5, 6, 7, 8, 9, or 10 nucleotides from, or has at least has at least 90%, 92%, 94%, 96%, 98%, or 99% homology with, the nucleotide sequence of SEQ ID NO: 405. In an embodiment, the PII promoter comprises, or consists of, a nucleotide sequence that is the same as the nucleotide sequence of SEQ ID NO: 405.

[0211] In an embodiment, the PII promoter component is an RCVRN promoter (e.g., a human RCVRN promoter) component, and comprises, or consists of, a nucleotide sequence that is the same as, differs by no more than 1, 2, 3, 4, 5, 6, 7, 8, 9, or 10 nucleotides from, or has at least has at least 90%, 92%, 94%, 96%, 98%, or 99% homology with, the nucleotide sequence of SEQ ID NO: 406. In an embodiment, the PII promoter comprises, or consists of, a nucleotide sequence that is the same as the nucleotide sequence of SEQ ID NO: 406.

[0212] In an embodiment, the N-ter NLS component comprises, or consists of, a nucleotide sequence that is the same as the nucleotide sequence of SEQ ID NO: 420 or a nucleotide sequence encoding the amino acid sequence of SEQ ID NO: 434.

[0213] In an embodiment, the Cas9 component comprises, or consists of, a nucleotide sequence that is the same as the nucleotide sequence of SEQ ID NO: 421 or a nucleotide sequence encoding the amino acid sequence of SEQ ID NO: 26.

[0214] In an embodiment, the C-ter NLS component comprises, or consists of, a nucleotide sequence that is the same as the nucleotide sequence of SEQ ID NO: 422 or a nucleotide sequence encoding the amino acid sequence of SEQ ID NO: 434.

[0215] In an embodiment, the poly(A) signal component comprises, or consists of, a nucleotide sequence that is the same as any of the nucleotide sequences disclosed in Table 27, or any of the nucleotide sequences of SEQ ID NOs: 424, 455 or 456. In an embodiment, the poly(A) signal component comprises, or consists of, a nucleotide sequence that is the same as the nucleotide sequence of SEQ ID NO: 424.

[0216] In an embodiment, the spacer 3 component comprises, or consists of, a nucleotide sequence that is the same as the nucleotide sequence of SEQ ID NO: 425.

[0217] In an embodiment, the right ITR component comprises, or consists of, a nucleotide sequence that is the same as any of the nucleotide sequences of SEQ ID NOs: 436-444.

[0218] In an embodiment, the recombinant AAV genome further comprises a second gRNA component comprising a targeting domain and a scaffold domain,

[0219] wherein the targeting domain consists of a targeting domain sequence disclosed herein, in any of Tables 2A-2D, Tables 3A-3C, Tables 4A-4D, Tables 5A-5D, Tables 6A-6B, Tables 7A-7D, Tables 8A-8D, Tables 9A-9E, Tables 10A-10B, or Table 11; and

[0220] wherein the scaffold domain (also referred to as a tracr domain in FIGS. 20A-25F) comprises, or consists of, a nucleotide sequence that is the same as, or differs by no more than 1, 2, 3, 4, or 5 nucleotides from, or has at least has at least 90%, 92%, 94%, 96%, 98%, or 99% homology with, the nucleotide sequence of SEQ ID NO: 418.

[0221] In an embodiment, the targeting domain of the second gRNA component comprises, or consists of, a nucleotide sequence that is the same as a nucleotide sequence selected from Table 11. In an embodiment, the second gRNA component is between the first gRNA component and the spacer 2 component.

[0222] In an embodiment, the second gRNA component has the same nucleotide sequence as the first gRNA component. In another embodiment, the second gRNA component has a nucleotide sequence that is different from the second gRNA component.

[0223] In an embodiment, the recombinant AAV genome further comprises a second PIII promoter component that comprises, or consists of, an RNA polymerase III promoter sequence;

[0224] In an embodiment, the recombinant AAV genome further comprises a second PIII promoter component (e.g., a second U6 promoter component) between the first gRNA component and the second gRNA component.

[0225] In an embodiment, the second PIII promoter component (e.g., the second U6 promoter component) has the same nucleotide sequence as the first PIII promoter component (e.g., the first U6 promoter component). In another embodiment, the second PIII promoter component (e.g., the second U6 promoter component) has a nucleotide sequence that is different from the first PIII promoter component (e.g. the first U6 promoter component).

[0226] In an embodiment, the PIII promoter component is an H1 promoter component that comprises an H1 promoter sequence.

[0227] In an embodiment, the PIII promoter component is a tRNA promoter component that comprises a tRNA promoter sequence.

[0228] In an embodiment, the recombinant AAV genome further comprises a spacer 4 component between the first gRNA component and the second PIII promoter component (e.g., the second U6 promoter component). In an embodiment, the spacer 4 component comprises, or consists of, a nucleotide sequence having 0 to 150 nucleotides in length, e.g., SEQ ID NO: 427. In an embodiment, the spacer 4 component comprises, or consists of, a nucleotide sequence that is the same as the nucleotide sequence of SEQ ID NO: 427.

[0229] In an embodiment, the recombinant AAV genome comprises the following components:

[chemical structure]

[0230] In an embodiment, the recombinant AAV genome further comprises an affinity tag component (e.g., 3×FLAG component), wherein the affinity tag component (e.g., 3×FLAG component) comprises, or consists of, a nucleotide sequence that is the same as, differs by no more than 1, 2, 3, 4, or 5 nucleotides from, or has at least has at least 90%, 92%, 94%, 96%, 98%, or 99% homology with, the nucleotides sequence of SEQ ID NO: 423, or a nucleotide sequence encoding any of the amino acid sequences disclosed in Table 26 or any of the amino acid sequences of SEQ ID NOs: 426 or 451-454.

[0231] In an embodiment, the affinity tag component (e.g., 3×FLAG component) is between the C-ter NLS component and the poly(A) signal component. In an embodiment, the an affinity tag component (e.g., 3×FLAG component) comprises, or consists of, a nucleotide sequence that is the same as, the nucleotides sequence of SEQ ID NO: 423, or a nucleotide sequence encoding any of the amino acid sequences of SEQ ID NOs: 426 or 451-454.

[0232] In an embodiment, the recombinant AAV genome comprises the nucleotide sequences of SEQ ID NOs: 408, 417, 418, 401, 420, 421, 422, 424, and 437.

[0233] In an embodiment, the recombinant AAV genome comprises the nucleotide sequences of SEQ ID NOs: 408, 417, 418, 402, 420, 421, 422, 424, and 437.

[0234] In an embodiment, the recombinant AAV genome comprises the nucleotide sequences of SEQ ID NOs: 408, 417, 418, 403, 420, 421, 422, 424, and 437.

[0235] In an embodiment, the recombinant AAV genome comprises the nucleotide sequences of SEQ ID NOs: 408, 417, 418, 404, 420, 421, 422, 424, and 437.

[0236] In an embodiment, the recombinant AAV genome comprises the nucleotide sequences of SEQ ID NOs: 408, 417, 418, 405, 420, 421, 422, 424, and 437.

[0237] In an embodiment, the recombinant AAV genome comprises the nucleotide sequences of SEQ ID NOs: 408, 417, 418, 406, 420, 421, 422, 424, and 437.

[0238] In an embodiment, the recombinant AAV genome further comprises SEQ ID NOs: 416, 419, and 425, and, optionally, SEQ ID NO 427.

[0239] In an embodiment, the recombinant AAV genome further comprises the nucleotide sequence of SEQ ID NO: 423.

[0240] In an embodiment, the recombinant AAV genome comprises or consists of one or more (e.g., 2, 3, 4, 5, 6, 7, 8, 9, 10, 11, 12 or all) of the component sequences shown in FIGS. 19A-19G, 20A-20F, 21A-21F, 22A-22F, 23A-23F, or 24A-24F, Tables 20 or 25-27, or any of the nucleotide sequences of SEQ ID NOs: 428-433 or 436-444.

[0241] In another aspect, disclosed herein is a recombinant adenovirus-associated virus (AAV) genome comprising the following components:

[chemical structure]

[0242] wherein the left ITR component comprises, or consists of, a nucleotide sequence that is the same as, or differs by no more than 1, 2, 3, 4, 5, 6, 7, 8, 9, or 10 nucleotides from, or has at least 90%, 92%, 94%, 96%, 98%, or 99% homology with, any of the left ITR nucleotide sequences disclosed in Table 25, or any of the nucleotide sequences of SEQ ID NOs: 407-415;

[0243] wherein the spacer 1 component comprises, or consists of, a nucleotide sequence having 0 to 150 nucleotides in length, e.g., SEQ ID NO: 416;

[0244] wherein the first PIII promoter component (e.g., a first U6 promoter component) comprises, or consists of, a nucleotide sequence that is the same as, differs by no more than 1, 2, 3, 4, 5, 6, 7, 8, 9, or 10 nucleotides from, or has at least has at least 90%, 92%, 94%, 96%, 98%, or 99% homology with, the nucleotide sequence of SEQ ID NO: 417;

[0245] wherein the first gRNA component comprises a targeting domain and a scaffold domain,
[0246] wherein the targeting domain is 16-26 nucleotides in length, and comprises, or consists of, a targeting domain sequence disclosed herein, e.g., in any of Tables 2A-2D, Tables 3A-3C, Tables 4A-4D, Tables 5A-5D, Tables 6A-6B, Tables 7A-7D, Tables 8A-8D, Tables 9A-9E, Tables 10A-10B, or Table 11; and
[0247] wherein the scaffold domain (also referred to herein as a tracr domain in FIGS. 19A-24F) comprises, or consists of, a nucleotide sequence that is the same as, or differs by no more than 1, 2, 3, 4, or 5 nucleotides from, or has at least has at least 90%, 92%, 94%, 96%, 98%, or 99% homology with, the nucleotide sequence of SEQ ID NO: 418;

[0248] wherein the spacer 4 component comprises, or consists of, a nucleotide sequence having 0 to 150 nucleotides in length, e.g., SEQ ID NO: 427.

[0249] wherein the second gRNA component comprises a targeting domain and a scaffold domain,
[0250] wherein the targeting domain of the second gRNA component is 16-26 nucleotides in length and comprises, or consists of, a targeting domain sequence disclosed herein, e.g., in any of Tables 2A-2D, Tables 3A-3C, Tables 4A-4D, Tables 5A-5D, Tables 6A-6B, Tables 7A-7D, Tables 8A-8D, Tables 9A-9E, Tables 10A-10B, or Table 11; and
[0251] wherein the scaffold domain (also referred to as a tracr domain in FIGS. 19A-24F) of the second gRNA component comprises, or consists of, a nucleotide sequence that is the same as, or differs by no more than 1, 2, 3, 4, or 5 nucleotides from, or has at least has at least 90%, 92%, 94%, 96%, 98%, or 99% homology with, the nucleotide sequence of SEQ ID NO: 418.

[0252] wherein the spacer 2 component comprises, or consists of, a nucleotide sequence having 0 to 150 nucleotides in length e.g., SEQ ID NO: 419;

[0253] wherein the PII promoter component comprises, or consists of, a polymerase II promoter sequence, e.g., a constitutive or tissue specific promoter, e.g., a promoter disclosed in Table 20;

[0254] wherein the N-ter NLS component comprises, or consists of, a nucleotide sequence that is the same as, differs by no more than 1, 2, 3, 4, or 5 nucleotides from, or has at least has at least 90%, 92%, 94%, 96%, 98%, or 99% homology with, the nucleotide sequence of SEQ ID NO: 420 or a nucleotide sequence that encodes the amino acid sequence of SEQ ID NO: 434;

[0255] wherein the Cas9 component comprises, or consists of, a nucleotide sequence that is the same as, differs by no more than 1, 2, 3, 4, 5, 6, 7, 8, 9, or 10 nucleotides from, or has at least 90%, 92%, 94%, 96%, 98%, or 99% homology with, the nucleotide sequence of SEQ ID NO: 421 or a nucleotide sequence that encodes the amino acid sequence of SEQ ID NO: 26;

[0256] wherein the C-ter NLS component comprises, or consists of, a nucleotide sequence that is the same as, differs by no more than 1, 2, 3, 4, or 5 nucleotides from, or has at least has at least 90%, 92%, 94%, 96%, 98%, or 99% homology with, the nucleotide sequence of SEQ ID NO: 422 or a nucleotide sequence that encodes the amino acid sequence of SEQ ID NO: 434;

[0257] wherein the poly(A) signal component comprises, or consists of, a nucleotide sequence that is the same as, differs by no more than 1, 2, 3, 4, 5, 6, 7, 8, 9, or 10 nucleotides from, or has at least has at least 90%, 92%, 94%, 96%, 98%, or 99% homology with, any of the nucleotide sequences disclosed in Table 27, or any of the nucleotide sequence of SEQ ID NO: 424, 455 or 456;

[0258] wherein the spacer 3 component comprises, or consists of, a nucleotide sequence having 0 to 150 nucleotides in length, e.g., SEQ ID NO: 425; and

[0259] wherein the right ITR component comprises, or consists of, a nucleotide sequence that is the same as, or differs by no more than 1, 2, 3, 4, 5, 6, 7, 8, 9, or 10 nucleotides from, or has at least has at least 90%, 92%, 94%, 96%, 98%, or 99% homology with, any of the right ITR nucleotide sequences disclosed in Table 25, or SEQ ID NOs: 436-444.

[0260] In an embodiment, the left ITR component comprises, or consists of, a nucleotide sequence that is the same as any of the nucleotide sequences of SEQ ID NOs: 407-415.

[0261] In an embodiment, the spacer 1 component comprises, or consists of, a nucleotide sequence that is the same as the nucleotide sequence of SEQ ID NO: 416.

[0262] In an embodiment, the first PIII promoter component (e.g., the first U6 promoter component) comprises, or consists of, a nucleotide sequence that is the same as the nucleotide sequence of SEQ ID NO: 417.

[0263] In an embodiment, the first PIII promoter is an H1 promoter component that comprises an H1 promoter sequence. In another embodiment, the first PIII promoter is a tRNA promoter component that comprises a tRNA promoter sequence.

[0264] In an embodiment, the targeting domain of the first gRNA component comprises, or consists of, a nucleotide sequence that is the same as a nucleotide sequence selected from Table 11.

[0265] In an embodiment, the gRNA scaffold domain of the first gRNA component comprises, or consists of, a nucleotide sequence that is the same as the nucleotide sequence of SEQ ID NO: 418.

[0266] In an embodiment, the spacer 4 component comprises, or consists of, a nucleotide sequence that is the same as the nucleotide sequence of SEQ ID NO: 427.

[0267] In an embodiment, the second PIII promoter component (e.g., the first U6 promoter component) has the same nucleotide sequence as the first PIII promoter component (e.g., the first U6 promoter component). In another embodiment, the second PIII promoter component (e.g., the second U6 promoter component) has a nucleotide sequence that is different from the first PIII promoter component (e.g., the first U6 promoter component).

[0268] In an embodiment, the second PIII promoter is an H1 promoter component that comprises an H1 promoter sequence. In another embodiment, the second PIII promoter is a tRNA promoter component that comprises a tRNA promoter sequence.

[0269] In an embodiment, the targeting domain of the second gRNA component comprises, or consists of, a nucleotide sequence that is the same as a nucleotide sequence selected from Table 11.

[0270] In an embodiment, the second gRNA component has the same nucleotide sequence as the first gRNA component. In another embodiment, the second gRNA component has a nucleotide sequence that is different from the second gRNA component.

[0271] In an embodiment, the spacer 2 component comprises, or consists of, a nucleotide sequence having 0 to 150 nucleotides in length e.g., SEQ ID NO: 419;

[0272] In an embodiment, the PII promoter component is a CMV promoter component, and comprises, or consists of, a nucleotide sequence that is the same as, differs by no more than 1, 2, 3, 4, 5, 6, 7, 8, 9, or 10 nucleotides from, or has at least has at least 90%, 92%, 94%, 96%, 98%, or 99% homology with, the nucleotide sequence of SEQ ID NO: 401. In an embodiment, the PII promoter comprises, or consists of, a nucleotide sequence that is the same as the nucleotide sequence of SEQ ID NO: 401.

[0273] In an embodiment, the PII promoter component is an EFS promoter component, and comprises, or consists of, a nucleotide sequence that is the same as, differs by no more than 1, 2, 3, 4, 5, 6, 7, 8, 9, or 10 nucleotides from, or has at least has at least 90%, 92%, 94%, 96%, 98%, or 99% homology with, the nucleotide sequence of SEQ ID NO: 402. In an embodiment, the PII promoter comprises, or consists of, a nucleotide sequence that is the same as the nucleotide sequence of SEQ ID NO: 402.

[0274] In an embodiment, the PII promoter component is a GRK1 promoter (e.g., a human GRK1 promoter) component, and comprises, or consists of, a nucleotide sequence that is the same as, differs by no more than 1, 2, 3, 4, 5, 6, 7, 8, 9, or 10 nucleotides from, or has at least has at least 90%, 92%, 94%, 96%, 98%, or 99% homology with, the nucleotide sequence of SEQ ID NO: 403. In an embodiment, the PII promoter comprises, or consists of, a nucleotide sequence that is the same as the nucleotide sequence of SEQ ID NO: 403.

[0275] In an embodiment, the PII promoter component is a CRX promoter (e.g., a human CRX promoter) component, and comprises, or consists of, a nucleotide sequence that is the same as, differs by no more than 1, 2, 3, 4, 5, 6, 7, 8, 9, or 10 nucleotides from, or has at least has at least 90%, 92%, 94%, 96%, 98%, or 99% homology with, the nucleotide sequence of SEQ ID NO: 404. In an embodiment, the PII promoter comprises, or consists of, a nucleotide sequence that is the same as the nucleotide sequence of SEQ ID NO: 404.

[0276] In an embodiment, the PII promoter component is an NRL promoter (e.g., a human NRL promoter) component, and comprises, or consists of, a nucleotide sequence that is the same as, differs by no more than 1, 2, 3, 4, 5, 6, 7, 8, 9, or 10 nucleotides from, or has at least has at least 90%, 92%, 94%, 96%, 98%, or 99% homology with, the nucleotide sequence of SEQ ID NO: 405. In an embodiment, the PII promoter comprises, or consists of, a nucleotide sequence that is the same as the nucleotide sequence of SEQ ID NO: 405.

[0277] In an embodiment, the PII promoter component is an RCVRN promoter (e.g., a human RCVRN promoter) component, and comprises, or consists of, a nucleotide sequence that is the same as, differs by no more than 1, 2, 3, 4, 5, 6, 7, 8, 9, or 10 nucleotides from, or has at least has at least 90%, 92%, 94%, 96%, 98%, or 99% homology with, the nucleotide sequence of SEQ ID NO: 406. In an embodiment, the PII promoter comprises, or consists of, a nucleotide sequence that is the same as the nucleotide sequence of SEQ ID NO: 406.

[0278] In an embodiment, the N-ter NLS component comprises, or consists of, a nucleotide sequence that is the same as the nucleotide sequence of SEQ ID NO: 420 or a nucleotide sequence encoding the amino acid sequence of SEQ ID NO: 434.

[0279] In an embodiment, the Cas9 component comprises, or consists of, a nucleotide sequence that is the same as the nucleotide sequence of SEQ ID NO: 421 or a nucleotide sequence encoding the amino acid sequence of SEQ ID NO: 26.

[0280] In an embodiment, the C-ter NLS component comprises, or consists of, a nucleotide sequence that is the same as the nucleotide sequence of SEQ ID NO: 422 or a nucleotide sequence encoding the amino acid sequence of SEQ ID NO: 434.

[0281] In an embodiment, the poly(A) signal component comprises, or consists of, a nucleotide sequence that is the same as any of the nucleotide sequences disclosed in Table 27, or any of the nucleotide sequences of SEQ ID NOs: 424, 455 or 456. In an embodiment, the poly(A) signal component comprises, or consists of, a nucleotide sequence that is the same as the nucleotide sequence of SEQ ID NO: 424.

[0282] In an embodiment, the spacer 3 component comprises, or consists of, a nucleotide sequence that is the same as the nucleotide sequence of SEQ ID NO: 425.

[0283] In an embodiment, the right ITR component comprises, or consists of, a nucleotide sequence that is the same as any of the nucleotide sequences disclosed in Table 25, or any of the nucleotide sequences of SEQ ID NOs: 436-444.

[0284] In an embodiment, the recombinant AAV genome further comprises an affinity tag component (e.g., a 3×FLAG component). In an embodiment, the affinity tag component (e.g., the 3×FLAG component) comprises, or consists of, a nucleotide sequence that is the same as, differs by no more than 1, 2, 3, 4, or 5 nucleotides from, or has at least has at least 90%, 92%, 94%, 96%, 98%, or 99% homology with, the nucleotide sequence of SEQ ID NO: 423, or a nucleotide sequence encoding any of the amino acid sequences disclosed in Table 26 or any of the amino acid sequences of SEQ ID NO: 426 or 451-454.

[0285] In an embodiment, the affinity tag component (e.g., the 3×FLAG component) is between the C-ter NLS component and the poly(A) signal component. In an embodiment, the affinity tag component (e.g., the 3×FLAG component) comprises, or consists of, a nucleotide sequence that is the same as, the nucleotide sequence of SEQ ID NO: 423 or a nucleotide sequence encoding the amino acid sequence of SEQ ID NO: 426.

[0286] In an embodiment, the recombinant AAV genome comprises the nucleotide sequences of SEQ ID NOs: 408, 417, 418, 401, 420, 421, 422, 424, and 437.

[0287] In an embodiment, the recombinant AAV genome comprises the nucleotide sequences of SEQ ID NOs: 408, 417, 418, 402, 420, 421, 422, 424, and 437.

[0288] In an embodiment, the recombinant AAV genome comprises the nucleotide sequences of SEQ ID NOs: 408, 417, 418, 403, 420, 421, 422, 424, and 437.

[0289] In an embodiment, the recombinant AAV genome comprises the nucleotide sequences of SEQ ID NOs: 408, 417, 418, 404, 420, 421, 422, 424, and 437.

[0290] In an embodiment, the recombinant AAV genome comprises the nucleotide sequences of SEQ ID NOs: 408, 417, 418, 405, 420, 421, 422, 424, and 437.

[0291] In an embodiment, the recombinant AAV genome comprises the nucleotide sequences of SEQ ID NOs: 408, 417, 418, 406, 420, 421, 422, 424, and 437.

[0292] In an embodiment, the recombinant AAV genome further comprises the nucleotide sequences of SEQ ID NO: 416, 419, 425, and 427.

[0293] In an embodiment, the recombinant AAV genome further comprises the nucleotide sequence of SEQ ID NO: 423.

[0294] In an embodiment, the recombinant AAV genome comprises any of the nucleotide sequences of SEQ ID NOs: 428-433.

[0295] In an embodiment, the recombinant AAV genome comprises, or consists of, a nucleotide sequence that is the same as, differs by no more than 100, 200, 300, 400, or 500 nucleotides from, or has at least has at least 90%, 92%, 94%, 96%, 98%, or 99% homology with any of the nucleotide sequences shown in FIGS. 19A-19G, 20A-20F, 21A-21F, 22A-22F, 23A-23F, or 24A-24F, or any of the nucleotide sequences of SEQ ID NOs: 428-433 or 436-444.

[0296] In an embodiment, the recombinant AAV genome comprises, or consists of, a nucleotide sequence that is the same as any of the nucleotide sequences shown in FIGS. 19A-19G, 20A-20F, 21A-21F, 22A-22F, 23A-23F, or 24A-24F, or any of the nucleotide sequences of SEQ ID NOs: 428-433 or 436-444.

[0297] In an embodiment, the recombinant AAV genome comprises or consists of one or more (e.g., 2, 3, 4, 5, 6, 7, 8, 9, 10, 11, 12 or all) of the component sequences shown in FIGS. 19A-19G, 20A-20F, 21A-21F, 22A-22F, 23A-23F, or 24A-24F, or Tables 20 or 25-27, or any of the nucleotide sequences of SEQ ID NOs: 428-433 or 436-444.

[0298] Unless otherwise indicated, when components of a recombinant AAV genome are described herein, the order can be as provided, but other orders are included as well. In other words, in an embodiment, the order is as set out in the text, but in other embodiments, the order can be different.

[0299] It is understood that the recombinant AAV genomes disclosed herein can be single stranded or double stranded. Disclosed herein are also the reverse, complementary form of any of the recombinant AAV genomes disclosed herein, and the double stranded form thereof.

[0300] In another aspect, disclosed herein is a nucleic acid molecule (e.g., an expression vector) that comprises a recombinant AAV genome disclosed herein. In an embodiment, the nucleic acid molecule further comprises a nucleotide sequence that encodes an antibiotic resistant gene (e.g., an Amp resistant gene). In an embodiment, the nucleic acid molecule further comprises replication origin sequence (e.g., a ColE1 origin, an M13 origin, or both).

[0301] In another aspect, disclosed herein is a recombinant AAV viral particle comprising a recombinant AAV genome disclosed herein.

[0302] In an embodiment, the recombinant AAV viral particle has any of the serotype disclosed herein, e.g., in Table 25, or a combination thereof. In another embodiment, the recombinant AAV viral particle has a tissue specificity of retinal pigment epithelium cells, photoreceptors, horizontal cells, bipolar cells, amacrine cells, ganglion cells, or a combination thereof.

[0303] In another aspect, disclosed herein is a method of producing a recombinant AAV viral particle disclosed herein comprising providing a recombinant AAV genome disclosed herein and one or more capsid proteins under conditions that allow for assembly of an AAV viral particle.

[0304] In another aspect, disclosed herein is a method of altering a cell comprising contacting the cell with a recombinant AAV viral particle disclosed herein.

[0305] In another aspect, disclosed herein is a method of treating a subject having or likely to develop LCA10 comprising contacting the subject (or a cell from the subject) with a recombinant viral particle disclosed herein.

[0306] In another aspect, disclosed herein is a recombinant AAV viral particle comprising a recombinant AAV genome disclosed herein for use in treating LCA10 in a subject.

[0307] In another aspect, disclosed herein is use of a recombinant AAV viral particle comprising a recombinant AAV genome disclosed herein in the manufacture of a medicament for treating LCA10 in a subject.

[0308] The gRNA molecules and methods, as disclosed herein, can be used in combination with a governing gRNA molecule, comprising a targeting domain which is complementary to a target domain on a nucleic acid that encodes a component of the CRISPR/Cas system introduced into a cell or subject. In an embodiment, the governing gRNA molecule targets a nucleic acid that encodes a Cas9 molecule or a nucleic acid that encodes a target gene gRNA molecule. In an embodiment, the governing gRNA comprises a targeting domain that is complementary to a target domain in a sequence that encodes a Cas9 component, e.g., a Cas9 molecule or target gene gRNA molecule. In an embodiment, the target domain is designed with, or has, minimal homology to other nucleic acid sequences in the cell, e.g., to minimize off-target cleavage. For example, the targeting domain on the governing gRNA can be selected to reduce or minimize off-target effects. In an embodiment, a target domain for a governing gRNA can be disposed in the control or coding region of a Cas9 molecule or disposed between a control region and a transcribed region. In an embodiment, a target domain for a governing gRNA can be disposed in the control or coding region of a target gene gRNA molecule or disposed between a control region and a transcribed region for a target gene gRNA. While not wishing to be bound by theory, in an embodiment, it is believed that altering, e.g., inactivating, a nucleic acid that encodes a Cas9 molecule or a nucleic acid that encodes a target gene gRNA molecule can be effected by cleavage of the targeted nucleic acid sequence or by binding of a Cas9 molecule/governing gRNA molecule complex to the targeted nucleic acid sequence.

[0309] The compositions, reaction mixtures and kits, as disclosed herein, can also include a governing gRNA molecule, e.g., a governing gRNA molecule disclosed herein.

[0310] Unless otherwise defined, all technical and scientific terms used herein have the same meaning as commonly understood by one of ordinary skill in the art to which this invention belongs. Although methods and materials similar or equivalent to those described herein can be used in the practice or testing of the present invention, suitable methods and materials are described below. All publications, patent applications, patents, and other references mentioned herein are incorporated by reference in their entirety. In addition, the materials, methods, and examples are illustrative only and not intended to be limiting.

[0311] Headings, including numeric and alphabetical headings and subheadings, are for organization and presentation and are not intended to be limiting.

[0312] Other features and advantages of the invention will be apparent from the detailed description, drawings, and from the claims.

### BRIEF DESCRIPTION OF THE DRAWINGS

[0313] FIGS. 1A-1G are representations of several exemplary gRNAs.

[0314] FIG. 1A depicts a modular gRNA molecule derived in part (or modeled on a sequence in part) from Streptococcus pyogenes (S. pyogenes) as a duplexed structure (SEQ ID NOs: 42 and 43, respectively, in order of appearance);

[0315] FIG. 1B depicts a unimolecular (or chimeric) gRNA molecule derived in part from S. pyogenes as a duplexed structure (SEQ ID NO: 44);

[0316] FIG. 1C depicts a unimolecular gRNA molecule derived in part from S. pyogenes as a duplexed structure (SEQ ID NO: 45);

[0317] FIG. 1D depicts a unimolecular gRNA molecule derived in part from S. pyogenes as a duplexed structure (SEQ ID NO: 46);

[0318] FIG. 1E depicts a unimolecular gRNA molecule derived in part from S. pyogenes as a duplexed structure (SEQ ID NO: 47);

[0319] FIG. 1F depicts a modular gRNA molecule derived in part from Streptococcus thermophilus (S. thermophilus) as a duplexed structure (SEQ ID NOs: 48 and 49, respectively, in order of appearance);

[0320] FIG. 1G depicts an alignment of modular gRNA molecules of S. pyogenes (SEQ ID NOs: 42 and 52) and S. thermophilus (SEQ ID NOs: 48 and 49).

[0321] FIGS. 2A-2G depict an alignment of Cas9 sequences from Chylinski 2013. The N-terminal RuvC-like domain is boxed and indicated with a “Y”. The other two RuvC-like domains are boxed and indicated with a “B”. The HNH-like domain is boxed and indicated by a “G”. Sm: S. mutans (SEQ ID NO: 1); Sp: S. pyogenes (SEQ ID NO: 2); St: S. thermophilus (SEQ ID NO: 3); Li: L. innocua (SEQ ID NO: 4). Motif: this is a motif based on the four sequences: residues conserved in all four sequences are indicated by single letter amino acid abbreviation; “*” indicates any amino acid found in the corresponding position of any of the four sequences; and “-” indicates any amino acid, e.g., any of the 20 naturally occurring amino acids.

[0322] FIGS. 3A-3B show an alignment of the N-terminal RuvC-like domain from the Cas9 molecules disclosed in Chylinski 2013 (SEQ ID NOs: 54, 56, and 58-103, respectively, in order of appearance). The last line of FIG. 3B identifies 4 highly conserved residues.

[0323] FIGS. 4A-4B show an alignment of the N-terminal RuvC-like domain from the Cas9 molecules disclosed in Chylinski 2013 with sequence outliers removed. The last line of FIG. 4B identifies 3 highly conserved residues.

[0324] FIGS. 5A-5C show an alignment of the HNH-like domain from the Cas9 molecules disclosed in Chylinski 2013 (SEQ ID NOs: 178-252, respectively, in order of appearance). The last line of FIG. 5C identifies conserved residues.

[0325] FIGS. 6A-6B show an alignment of the HNH-like domain from the Cas9 molecules disclosed in Chylinski 2013 with sequence outliers removed. The last line of FIG. 6B identifies 3 highly conserved residues.

[0326] FIGS. 7A-7B depict an alignment of Cas9 sequences from S. pyogenes and Neisseria meningitidis (N. meningitidis). The N-terminal RuvC-like domain is boxed and indicated with a “Y”. The other two RuvC-like domains are boxed and indicated with a “B”. The HNH-like domain is boxed and indicated with a “G”. Sp: S. pyogenes; Nm: N. meningitidis. Motif: this is a motif based on the two sequences: residues conserved in both sequences are indicated by a single amino acid designation; “*” indicates any amino acid found in the corresponding position of any of the two sequences; “-” indicates any amino acid, e.g., any of the 20 naturally occurring amino acids, and “-” indicates any amino acid, e.g., any of the 20 naturally occurring amino acids, or absent.

[0327] FIG. 8 shows a nucleic acid sequence encoding Cas9 of N. meningitidis (SEQ ID NO: 303). Sequence indicated by an “R” is an SV40 NLS; sequence indicated as “G” is an HA tag; and sequence indicated by an “0” is a synthetic NLS sequence; the remaining (unmarked) sequence is the open reading frame (ORF).

[0328] FIGS. 9A-9B are schematic representations of the domain organization of S. pyogenes Cas 9. FIG. 9A shows the organization of the Cas9 domains, including amino acid positions, in reference to the two lobes of Cas9 (recognition (REC) and nuclease (NUC) lobes). FIG. 9B shows the percent homology of each domain across 83 Cas9 orthologs.)

[0329] FIG. 10 shows the nucleotide locations of the Alu repeats, cryptic exon and point mutation, c.2991+1655 A to G in the human CEP290 locus. “X” indicates the cryptic exon. The blue triangle indicates the LCA target position c.2991+1655A to G.

[0330] FIG. 11A-11B show the rates of indels induced by various gRNAs at the CEP290 locus. FIG. 11A shows gene editing (% indels) as assessed by sequencing for S. pyogenes and S. aureus gRNAs when co-expressed with Cas9 in patient-derived IVS26 primary fibroblasts. FIG. 11B shows gene editing (% indels) as assessed by sequencing for S. aureus gRNAs when co-expressed with Cas9 in HEK293 cells.

[0331] FIGS. 12A-12B show changes in expression of the wild-type and mutant (including cryptic exon) alleles of CEP290 in cells transfected with Cas9 and the indicated gRNA pairs. Total RNA was isolated from modified cells and qRT-PCR with Taqman primer-probe sets was used to quantify expression. Expression is normalized to the Beta-Actin housekeeping gene and each sample is normalized to the GFP control sample (cells transfected with only GFP). Error bars represent standard deviation of 4 technical replicates.

[0332] FIG. 13 shows changes in gene expression of the wild-type and mutant (including cryptic exon) alleles of CEP290 in cells transfected with Cas9 and pairs of gRNAs shown to have in initial qRT-PCR screening. Total RNA was isolated from modified cells and qRT-PCR with Taqman primer-probe sets was used to quantify expression. Expression is normalized to the Beta-Actin housekeeping gene and each sample is normalized to the GFP control sample (cells transfected with only GFP). Error bars represent standard error of the mean of two to six biological replicates.

[0333] FIG. 14 shows deletion rates in cells transfected with indicated gRNA pairs and Cas9 as measured by droplet digital PCR (ddPCR). % deletion was calculated by dividing the number of positive droplets in deletion assay by the number of positive droplets in a control assay. Three biological replicates are shown for two different gRNA pairs.

[0334] FIG. 15 shows deletion rates in 293T cells transfected with exemplary AAV expression plasmids. pSS10 encodes EFS-driven saCas9 without gRNA. pSS15 and pSS17 encode EFS-driven saCas9 and one U6-driven gRNA, CEP290-64 and CEP290-323 respectively. pSS11 encodes EFS-driven saCas9 and two U6-driven gRNAs, CEP290-64 and CEP290-323 in the same vector. Deletion PCR were performed with gDNA exacted from 293T cells post transfection. The size of the PCR amplicons indicates the presence or absence of deletion events, and the deletion ratio was calculated.

[0335] FIG. 16 shows the composition of structural proteins in AAV2 viral preps expressing Cas9. Reference AAV2 vectors (lanes 1 & 2) were obtained from Vector Core at University of North Carolina, Chapel Hill. AAV2-CMV-GFP (lane 3) and AAV2-CMV-saCas9-minpA (lane4) were packaged and purified with “Triple Transfection Protocol” followed by CsCl ultracentrifugation. Titers were obtained by quantitative PCR with primers annealing to the ITR structures on these vectors. Viral preps were denatured and probed with B1 antibody on Western Blots to demonstrate three structural proteins composing AAV2, VP1, VP2, and VP3 respectively.

[0336] FIG. 17 depicts the deletion rates in 293T cells transduced with AAV viral vectors at MOI of 1000 viral genome (vg) per cell and 10,000 vg per cell. AAV2 viral vectors were produced with “Triple Transfection Protocol” using pHelper, pRep2Cap2, pSS8 encoding gRNAs CEP290-64 and CEP290-323, and CMV-driven saCas9. Viral preps were titered with primers annealing to ITRs on pSS8. 6 days post transduction, gDNA were extracted from 293T cells. Deletion PCR was carried out on the CEP290 locus, and deletion rates were calculated based on the predicted amplicons. Western blotting was carried out to show the AAV-mediated saCas9 expression in 293T cells (primary antibody: anti-Flag, M2; loading control: anti-alphaTubulin).

[0337] FIG. 18A-18B depicts additional exemplary structures of unimolecular gRNA molecules. FIG. 18A (SEQ ID NO: 45) shows an exemplary structure of a unimolecular gRNA molecule derived in part from S. pyogenes as a duplexed structure. FIG. 18B (SEQ ID NO: 2779) shows an exemplary structure of a unimolecular gRNA molecule derived in part from S. aureus as a duplexed structure.

[0338] FIGS. 19A-19G depicts the nucleotide sequence of an exemplary recombinant AAV genome containing a CMV promoter. Various components of the recombinant AAV genome are also indicated. N=A, T, G or C. The number of N residues can vary, e.g., from 16 to 26 nucleotides. Upper stand: 5′→3′ (SEQ ID NO: 428); lower stand: 3′→5′ SEQ ID NO: 445).

[0339] FIGS. 20A-20F depicts the nucleotide sequence of an exemplary recombinant AAV genome containing an EFS promoter. Various components of the recombinant AAV genome are also indicated. N=A, T, G or C. The number of N residues can vary, e.g., from 16 to 26 nucleotides. Upper stand: 5′→3′ (SEQ ID NO: 429); lower stand: 3′→5′ (SEQ ID NO: 446).

[0340] FIGS. 21A-21F depicts the nucleotide sequence of an exemplary recombinant AAV genome containing a CRK1 promoter. Various components of the recombinant AAV genome are also indicated. N=A, T, G or C. The number of N residues can vary, e.g., from 16 to 26 nucleotides. Upper stand: 5′→3′ (SEQ ID NO: 430); lower stand: 3′→5′ (SEQ ID NO: 447).

[0341] FIGS. 22A-22F depicts the nucleotide sequence of an exemplary recombinant AAV genome containing a CRX promoter. Various components of the recombinant AAV genome are also indicated. N=A, T, G or C. The number of N residues can vary, e.g., from 16 to 26 nucleotides. Upper stand: 5′→3′ (SEQ ID NO: 431); lower stand: 3′→5′ (SEQ ID NO: 448).

[0342] FIGS. 23A-23F depicts the nucleotide sequence of an exemplary recombinant AAV genome containing a NRL promoter. Various components of the recombinant AAV genome are also indicated. N=A, T, G or C. The number of N residues can vary, e.g., from 16 to 26 nucleotides. Upper stand: 5′→3′ (SEQ ID NO: 432); lower stand: 3′→5′ (SEQ ID NO: 449).

[0343] FIGS. 24A-24F depicts the nucleotide sequence of an exemplary recombinant AAV genome containing a NRL promoter. Various components of the recombinant AAV genome are also indicated. N=A, T, G or C. The number of N residues can vary, e.g., from 16 to 26 nucleotides. Upper stand: 5′→3′ (SEQ ID NO: 433); lower stand: 3′→5′ (SEQ ID NO: 450).

[0344] FIGS. 25A-D include schematic depictions of exemplary AAV viral genome according to certain embodiments of the disclosure. FIG. 25A shows an AAV genome for use in altering a CEP290 target position which encodes, inter alia, two guide RNAs having specific targeting domains selected from SEQ ID NOs: 389-391, 388, 392, and 394 and an S. aureus Cas9. In certain embodiments, the AAV genome having the configuration illustrated in FIG. 25A may comprise the sequence set forth in SEQ ID NO: 2802. In certain of those embodiments, the genome having the configuration illustrated in FIG. 25A may comprise the sequence set forth in SEQ ID NO: 2803. FIG. 25B shows an AAV genome that may be used for a variety of applications, including without limitation the alteration of the CEP290 target position, encoding two guide RNAs comprising the sequences of SEQ ID NOs: 2785 and 2787 and an S. aureus Cas9. FIG. 25C shows an AAV genome encoding one or two guide RNAs, each driven by a U6 promoter, and an S. aureus Cas9. In the figure, N may be 1 or two. FIG. 25D shows a further annotated version of FIG. 25A, illustrating an AAV genome for use in altering a CEP290 target position which encodes the targeting domains from SEQ ID NOs: 389 and 388 and an S. aureus Cas9. In certain embodiments, the AAV genome having the configuration illustrated in FIG. 25D may comprise the sequence set forth in SEQ ID NO: 2802. In certain of those embodiments, the genome having the configuration illustrated in FIG. 25D may comprise the sequence set forth in SEQ ID NO: 2803.

[0345] FIG. 26 illustrates the genome editing strategy implemented in certain embodiments of this disclosure.

[0346] FIG. 27A shows a photomicrograph of a mouse retinal explant on a support matrix; retinal tissue is indicated by the arrow. FIG. 27B shows a fluorescence micrograph from a histological section of a mouse retinal explant illustrating AAV transduction of cells in multiple retinal layers with a GFP reporter. FIG. 27C shows a micrograph from a histological section of a primate retinal tissue treated with vehicle. FIG. 27D shows a micrograph from a histological section of a primate retinal tissue treated with AAV5 vector encoding S. aureus Cas9 operably linked to the photoreceptor-specific hGRK1 promoter. Dark staining in the outer nuclear layer (ONL) indicates that cells were successfully transduced with AAV and express Cas9.

[0347] FIG. 28A and FIG. 28B show expression of Cas9 mRNA and gRNA, respectively, normalized to GAPDH mRNA expression. UT denotes untreated; GRK1-Cas refers to a vector in which Cas9 expression is driven by the photoreceptor-specific hGRK1 promoter; dCMV-Cas and EFS-Cas similarly refer to vectors in which Cas9 expression is driven by the dCMV promoter or the EFS promoter. Conditions in which gRNAs are included in the vector are denoted by the bar captioned “with gRNA.” Light and dark bars depict separate experimental replicates.

[0348] FIG. 29 summarizes the edits observed in mouse retinal explants 7 days after transduction with AAV5-mCEPgRNAs-Cas9. Edits were binned into one of three categories: no edit, indel at one of two guide sites, and deletion of sequence between the guide sites. Each bar graph depicts the observed edits as a percentage of sequence reads from individual explants transduced with AAV vectors in which Cas9 was driven by the promoter listed (hGRK1, CMV or EFS).

[0349] FIG. 30 summarizes the edits observed in the CEP290 gene in retinal punch samples obtained from cynomolgus monkeys treated with AAV vectors encoding genome editing systems according to the present disclosure.

[0350] FIG. 31A depicts a reporter construct that was used to assess the effect of certain editing outcomes, including inversions and deletions, on the IVS26 splicing defect. FIG. 31B depicts the relative levels of GFP reporter expression in WT, IVS26, deletion and inversion conditions, normalized to mCherry expression.

[0351] FIG. 32 summarizes the productive CEP290 edits observed in human retinal explants 14 or 28 days after transduction with AAV vectors in which Cas9 was driven by the promoter listed (hGRK1 or CMV).

### DETAILED DESCRIPTION

### Definitions

[0352] Unless otherwise specified, each of the following terms has the meaning set forth in this section.

[0353] The indefinite articles “a” and “an” denote at least one of the associated noun, and are used interchangeably with the terms “at least one” and “one or more.” For example, the phrase “a module” means at least one module, or one or more modules.

[0354] The conjunctions “or” and “and/or” are used interchangeably.

[0355] “Domain” as used herein is used to describe segments of a protein or nucleic acid. Unless otherwise indicated, a domain is not required to have any specific functional property.

[0356] An “indel” is an insertion and/or deletion in a nucleic acid sequence. An indel may be the product of the repair of a DNA double strand break, such as a double strand break formed by a genome editing system of the present disclosure. An indel is most commonly formed when a break is repaired by an “error prone” repair pathway such as the NHEJ pathway described below. Indels are typically assessed by sequencing (most commonly by “next-gen” or “sequencing-by-synthesis” methods, though Sanger sequencing may still be used) and are quantified by the relative frequency of numerical changes (e.g., ±1, ±2 or more bases) at a site of interest among all sequencing reads. DNA samples for sequencing can be prepared by a variety of methods known in the art, and may involve the amplification of sites of interest by polymerase chain reaction (PCR) or the capture of DNA ends generated by double strand breaks, as in the GUIDEseq process described in Tsai 2016 (incorporated by reference herein). Other sample preparation methods are known in the art. Indels may also be assessed by other methods, including in situ hybridization methods such as the FiberComb™ system commercialized by Genomic Vision (Bagneux, France), and other methods known in the art.

[0357] “CEP290 target position” and “CEP290 target site” are used interchangeably herein to refer to a nucleotide or nucleotides in or near the CEP290 gene that are targeted for alteration using the methods described herein. In certain embodiments, a mutation at one or more of these nucleotides is associated with a CEP290 associated disease. The terms “CEP290 target position” and “CEP290 target site” are also used herein to refer to these mutations. For example, the IVS26 mutation is one non-limiting embodiment of a CEP290 target position/target site.

[0358] Calculations of homology or sequence identity between two sequences (the terms are used interchangeably herein) are performed as follows. The sequences are aligned for optimal comparison purposes (e.g., gaps can be introduced in one or both of a first and a second amino acid or nucleic acid sequence for optimal alignment and non-homologous sequences can be disregarded for comparison purposes). The optimal alignment is determined as the best score using the GAP program in the GCG software package with a Blossum 62 scoring matrix with a gap penalty of 12, a gap extend penalty of 4, and a frameshift gap penalty of 5. The amino acid residues or nucleotides at corresponding amino acid positions or nucleotide positions are then compared. When a position in the first sequence is occupied by the same amino acid residue or nucleotide as the corresponding position in the second sequence, then the molecules are identical at that position. The percent identity between the two sequences is a function of the number of identical positions shared by the sequences.

[0359] “Governing gRNA molecule” as used herein refers to a gRNA molecule that comprises a targeting domain that is complementary to a target domain on a nucleic acid that comprises a sequence that encodes a component of the CRISPR/Cas system that is introduced into a cell or subject. A governing gRNA does not target an endogenous cell or subject sequence. In an embodiment, a governing gRNA molecule comprises a targeting domain that is complementary with a target sequence on: (a) a nucleic acid that encodes a Cas9 molecule; (b) a nucleic acid that encodes a gRNA which comprises a targeting domain that targets the CEP290 gene (a target gene gRNA); or on more than one nucleic acid that encodes a CRISPR/Cas component, e.g., both (a) and (b). In an embodiment, a nucleic acid molecule that encodes a CRISPR/Cas component, e.g., that encodes a Cas9 molecule or a target gene gRNA, comprises more than one target domain that is complementary with a governing gRNA targeting domain. While not wishing to be bound by theory, it is believed that a governing gRNA molecule complexes with a Cas9 molecule and results in Cas9 mediated inactivation of the targeted nucleic acid, e.g., by cleavage or by binding to the nucleic acid, and results in cessation or reduction of the production of a CRISPR/Cas system component. In an embodiment, the Cas9 molecule forms two complexes: a complex comprising a Cas9 molecule with a target gene gRNA, which complex will alter the CEP290 gene; and a complex comprising a Cas9 molecule with a governing gRNA molecule, which complex will act to prevent further production of a CRISPR/Cas system component, e.g., a Cas9 molecule or a target gene gRNA molecule. In an embodiment, a governing gRNA molecule/Cas9 molecule complex binds to or promotes cleavage of a control region sequence, e.g., a promoter, operably linked to a sequence that encodes a Cas9 molecule, a sequence that encodes a transcribed region, an exon, or an intron, for the Cas9 molecule. In an embodiment, a governing gRNA molecule/Cas9 molecule complex binds to or promotes cleavage of a control region sequence, e.g., a promoter, operably linked to a gRNA molecule, or a sequence that encodes the gRNA molecule. In an embodiment, the governing gRNA, e.g., a Cas9-targeting governing gRNA molecule, or a target gene gRNA-targeting governing gRNA molecule, limits the effect of the Cas9 molecule/target gene gRNA molecule complex-mediated gene targeting. In an embodiment, a governing gRNA places temporal, level of expression, or other limits, on activity of the Cas9 molecule/target gene gRNA molecule complex. In an embodiment, a governing gRNA reduces off-target or other unwanted activity. In an embodiment, a governing gRNA molecule inhibits, e.g., entirely or substantially entirely inhibits, the production of a component of the Cas9 system and thereby limits, or governs, its activity.

[0360] “Modulator” as used herein refers to an entity, e.g., a drug that can alter the activity (e.g., enzymatic activity, transcriptional activity, or translational activity), amount, distribution, or structure of a subject molecule or genetic sequence. In an embodiment, modulation comprises cleavage, e.g., breaking of a covalent or non-covalent bond, or the forming of a covalent or non-covalent bond, e.g., the attachment of a moiety, to the subject molecule. In an embodiment, a modulator alters the, three dimensional, secondary, tertiary, or quaternary structure, of a subject molecule. A modulator can increase, decrease, initiate, or eliminate a subject activity.

[0361] “Large molecule” as used herein refers to a molecule having a molecular weight of at least 2, 3, 5, 10, 20, 30, 40, 50, 60, 70, 80, 90, or 100 kD. Large molecules include proteins, polypeptides, nucleic acids, biologics, and carbohydrates.

[0362] “Polypeptide” as used herein refers to a polymer of amino acids having less than 100 amino acid residues. In an embodiment, it has less than 50, 20, or 10 amino acid residues.

[0363] “Non-homologous end joining” or “NHEJ”, as used herein, refers to ligation mediated repair and/or non-template mediated repair including, e.g., canonical NHEJ (cNHEJ), alternative NHEJ (altNHEJ), microhomology-mediated end joining (MMEJ), single-strand annealing (SSA), and synthesis-dependent microhomology-mediated end joining (SD-MMEJ).

[0364] “Reference molecule”, e.g., a reference Cas9 molecule or reference gRNA, as used herein refers to a molecule to which a subject molecule, e.g., a subject Cas9 molecule of subject gRNA molecule, e.g., a modified or candidate Cas9 molecule is compared. For example, a Cas9 molecule can be characterized as having no more than 10% of the nuclease activity of a reference Cas9 molecule. Examples of reference Cas9 molecules include naturally occurring unmodified Cas9 molecules, e.g., a naturally occurring Cas9 molecule such as a Cas9 molecule of S. pyogenes, S. aureus, or S. thermophilus. In an embodiment, the reference Cas9 molecule is the naturally occurring Cas9 molecule having the closest sequence identity or homology with the Cas9 molecule to which it is being compared. In an embodiment, the reference Cas9 molecule is a sequence, e.g., a naturally occurring or known sequence, which is the parental form on which a change, e.g., a mutation has been made.

[0365] “Replacement”, or “replaced”, as used herein with reference to a modification of a molecule does not require a process limitation but merely indicates that the replacement entity is present.

[0366] “Small molecule” as used herein refers to a compound having a molecular weight less than about 2 kD, e.g., less than about 2 kD, less than about 1.5 kD, less than about 1 kD, or less than about 0.75 kD.

[0367] “Subject” as used herein means a human, mouse, or non-human primate. A human subject can be any age (e.g., an infant, child, young adult, or adult), and may suffer from a disease, or may be in need of alteration of a gene.

[0368] “Treat,” “treating,” and “treatment” as used herein mean the treatment of a disease in a subject (e.g., a human subject), including one or more of inhibiting the disease, i.e., arresting or preventing its development or progression; relieving the disease, i.e., causing regression of the disease state; relieving one or more symptoms of the disease; and curing the disease.

[0369] “Prevent,” “preventing,” and “prevention” as used herein means the prevention of a disease in a subject, e.g., in a human, including (a) avoiding or precluding the disease; (b) affecting the predisposition toward the disease; (c) preventing or delaying the onset of at least one symptom of the disease.

[0370] The terms “polynucleotide”, “nucleotide sequence”, “nucleic acid”, “nucleic acid molecule”, “nucleic acid sequence”, and “oligonucleotide” as used herein refer to a series of nucleotide bases (also called “nucleotides”) in DNA and RNA, and mean any chain of two or more nucleotides. The polynucleotides can be chimeric mixtures or derivatives or modified versions thereof, single-stranded or double-stranded. The oligonucleotide can be modified at the base moiety, sugar moiety, or phosphate backbone, for example, to improve stability of the molecule, its hybridization parameters, etc. A nucleotide sequence typically carries genetic information, including the information used by cellular machinery to make proteins and enzymes. These terms include double- or single-stranded genomic DNA, RNA, any synthetic and genetically manipulated polynucleotide, and both sense and antisense polynucleotides. This also includes nucleic acids containing modified bases.

[0371] “X” as used herein in the context of an amino acid sequence, refers to any amino acid (e.g., any of the twenty natural amino acids) unless otherwise specified.

[0372] Conventional IUPAC notation is used in nucleotide sequences presented herein, as shown in Table 1, below (see also Cornish-Bowden 1985, incorporated by reference herein). It should be noted, however, that “T” denotes “Thymine or Uracil” insofar as a given sequence (such as a gRNA sequence) may be encoded by either DNA or RNA.

TABLE 1
IUPAC nucleic acid notation

| Character | Base |
|---|---|
| A | Adenine |
| T | Thymine |
| G | Guanine |
| C | Cytosine |
| U | Uracil |
| K | G or T/U |
| M | A or C |
| R | A or G |
| Y | C or T/U |
| S | C or G |
| W | A or T/U |
| B | C, G, or T/U |
| V | A, C, or G |
| H | A, C, or T/U |
| D | A, G, or T/U |
| N | A, C, G, or T/U |

[0373] The terms “protein,” “peptide” and “polypeptide” are used interchangeably herein to refer to a sequential chain of amino acids linked together via peptide bonds. The terms include individual proteins, groups or complexes of proteins that associate together, as well as fragments, variants, derivatives and analogs of such proteins. Peptide sequences are presented using conventional notation, beginning with the amino or N-terminus on the left, and proceeding to the carboxyl or C-terminus on the right. Standard one-letter or three-letter abbreviations may be used.

### Methods of Altering CEP290

[0374] CEP290 encodes a centrosomal protein that plays a role in centrosome and cilia development. The CEP290 gene is involved in forming cilia around cells, particularly in the photoreceptors at the back of the retina, which are needed to detect light and color.

[0375] Disclosed herein are methods and compositions for altering the LCA10 target position in the CEP290 gene. LCA10 target position can be altered (e.g., corrected) by gene editing, e.g., using CRISPR-Cas9 mediated methods. The alteration (e.g., correction) of the mutant CEP290 gene can be mediated by any mechanism. Exemplary mechanisms that can be associated with the alteration (e.g., correction) of the mutant CEP290 gene include, but are not limited to, non-homologous end joining (e.g., classical or alternative), microhomology-mediated end joining (MMEJ), homology-directed repair (e.g., endogenous donor template mediated), SDSA (synthesis dependent strand annealing), single strand annealing or single strand invasion. Methods described herein introduce one or more breaks near the site of the LCA target position (e.g., c.2991+1655A to G) in at least one allele of the CEP290 gene. In an embodiment, the one or more breaks are repaired by NHEJ. During repair of the one or more breaks, DNA sequences are inserted and/or deleted resulting in the loss or destruction of the cryptic splice site resulting from the mutation at the LCA10 target position (e.g., c.2991+1655A to G). The method can include acquiring knowledge of the mutation carried by the subject, e.g., by sequencing the appropriate portion of the CEP290 gene.

[0376] Altering the LCA10 target position refers to (1) break-induced introduction of an indel (also referred to herein as NHEJ-mediated introduction of an indel) in close proximity to or including a LCA10 target position (e.g., c.2991+1655A to G), or (2) break-induced deletion (also referred to herein as NHEJ-mediated deletion) of genomic sequence including the mutation at a LCA10 target position (e.g., c.2991+1655A to G). Both approaches give rise to the loss or destruction of the cryptic splice site.

[0377] In an embodiment, the method comprises introducing a break-induced indel in close proximity to or including the LCA10 target position (e.g., c.2991+1655A to G). As described herein, in one embodiment, the method comprises the introduction of a double strand break sufficiently close to (e.g., either 5′ or 3′ to) the LCA10 target position, e.g., c.2991+1655A to G, such that the break-induced indel could be reasonably expected to span the mutation. A single gRNAs, e.g., unimolecular (or chimeric) or modular gRNA molecules, is configured to position a double strand break sufficiently close to the LCA10 target position in the CEP290 gene. In an embodiment, the break is positioned to avoid unwanted target chromosome elements, such as repeat elements, e.g., an Alu repeat. The double strand break may be positioned within 40 nucleotides (e.g., within 1, 2, 3, 4, 5, 10, 15, 16, 17, 18, 19, 20, 25, 30, 35 or 40 nucleotides) upstream of the LCA10 target position, or within 40 nucleotides (e.g., within 1, 2, 3, 4, 5, 10, 15, 16, 17, 18, 19, 20, 25, 30, 35 or 40 nucleotides) downstream of the LCA10 target position (see FIG. 9). While not wishing to be bound by theory, in an embodiment, it is believed that NHEJ-mediated repair of the double strand break allows for the NHEJ-mediated introduction of an indel in close proximity to or including the LCA10 target position.

[0378] In another embodiment, the method comprises the introduction of a pair of single strand breaks sufficiently close to (either 5′ or 3′ to, respectively) the mutation at the LCA10 target position (e.g., c.2991+1655A to G) such that the break-induced indel could be reasonably expected to span the mutation. Two gRNAs, e.g., unimolecular (or chimeric) or modular gRNA molecules, are configured to position the two single strand breaks sufficiently close to the LCA10 target position in the CEP290 gene. In an embodiment, the breaks are positioned to avoid unwanted target chromosome elements, such as repeat elements, e.g., an Alu repeat. In an embodiment, the pair of single strand breaks is positioned within 40 nucleotides (e.g., within 1, 2, 3, 4, 5, 10, 15, 16, 17, 18, 19, 20, 25, 30, 35 or 40 nucleotides) upstream of the LCA10 target position, or within 40 nucleotides (e.g., within 1, 2, 3, 4, 5, 10, 15, 16, 17, 18, 19, 20, 25, 30, 35 or 40 nucleotides) downstream of the LCA10 target position (see FIG. 9). While not wishing to be bound by theory, in an embodiment, it is believed that NHEJ mediated repair of the pair of single strand breaks allows for the NHEJ-mediated introduction of an indel in close proximity to or including the LCA10 target position. In an embodiment, the pair of single strand breaks may be accompanied by an additional double strand break, positioned by a third gRNA molecule, as is discussed below. In another embodiment, the pair of single strand breaks may be accompanied by two additional single strand breaks positioned by a third gRNA molecule and a fourth gRNA molecule, as is discussed below.

[0379] In an embodiment, the method comprises introducing a break-induced deletion of genomic sequence including the mutation at the LCA10 target position (e.g., c.2991+1655A to G). As described herein, in one embodiment, the method comprises the introduction of two double strand breaks—one 5′ and the other 3′ to (i.e., flanking) the LCA10 target position. Two gRNAs, e.g., unimolecular (or chimeric) or modular gRNA molecules, are configured to position the two double strand breaks on opposite sides of the LCA10 target position in the CEP290 gene. In an embodiment, the first double strand break is positioned upstream of the LCA10 target position within intron 26 (e.g., within 1654 nucleotides), and the second double strand break is positioned downstream of the LCA10 target position within intron 26 (e.g., within 4183 nucleotides) (see FIG. 10). In an embodiment, the breaks (i.e., the two double strand breaks) are positioned to avoid unwanted target chromosome elements, such as repeat elements, e.g., an Alu repeat, or the endogenous CEP290 splice sites.

[0380] The first double strand break may be positioned as follows:
[0381] (1) upstream of the 5′ end of the Alu repeat in intron 26,
[0382] (2) between the 3′ end of the Alu repeat and the LCA10 target position in intron 26, or
[0383] (3) within the Alu repeat provided that a sufficient length of the gRNA fall outside of the repeat so as to avoid binding to other Alu repeats in the genome, and the second double strand break to be paired with the first double strand break may be positioned downstream of the LCA10 target position in intron 26.

[0384] For example, the first double strand break may be positioned:
[0385] (1) within 1162 nucleotides upstream of the 5′ end of the Alu repeat,
[0386] (2) within 1000 nucleotides upstream of the 5′ end of the Alu repeat,
[0387] (3) within 900 nucleotides upstream of the 5′ end of the Alu repeat,
[0388] (4) within 800 nucleotides upstream of the 5′ end of the Alu repeat,
[0389] (5) within 700 nucleotides upstream of the 5′ end of the Alu repeat,
[0390] (6) within 600 nucleotides upstream of the 5′ end of the Alu repeat,
[0391] (7) within 500 nucleotides upstream of the 5′ end of the Alu repeat,
[0392] (8) within 400 nucleotides upstream of the 5′ end of the Alu repeat,
[0393] (9) within 300 nucleotides upstream of the 5′ end of the Alu repeat,
[0394] (10) within 200 nucleotides upstream of the 5′ end of the Alu repeat,
[0395] (11) within 100 nucleotides upstream of the 5′ end of the Alu repeat,
[0396] (12) within 50 nucleotides upstream of the 5′ end of the Alu repeat,
[0397] (13) within the Alu repeat provided that a sufficient length of the gRNA falls outside of the repeat so as to avoid binding to other Alu repeats in the genome,
[0398] (14) within 40 nucleotides (e.g., within 1, 2, 3, 4, 5, 10, 15, 16, 17, 18, 19, 20, 25, 30, 35 or 40 nucleotides) upstream of the LCA10 target position, or
[0399] (15) within 17 nucleotides (e.g., within 1, 2, 3, 4, 5, 10, 15, 16 or 17 nucleotides) upstream of the LCA10 target position,
   and the second double strand breaks to be paired with the first double strand break may be positioned:
[0400] (1) within 4183 nucleotides downstream of the LCA10 target position,
[0401] (2) within 4000 nucleotides downstream of the LCA10 target position,
[0402] (3) within 3000 nucleotides downstream of the LCA10 target position,
[0403] (4) within 2000 nucleotides downstream of the LCA10 target position,
[0404] (5) within 1000 nucleotides downstream of the LCA10 target position,
[0405] (6) within 700 nucleotides downstream of the LCA10 target position,
[0406] (7) within 500 nucleotides downstream of the LCA10 target position,
[0407] (8) within 300 nucleotides downstream of the LCA10 target position,
[0408] (9) within 100 nucleotides downstream of the LCA10 target position,
[0409] (10) within 60 nucleotides downstream of the LCA10 target position, or
[0410] (11) within 40 (e.g., 1, 2, 3, 4, 5, 10, 15, 20, 25, 30, 35 or 40 nucleotides) nucleotides downstream of the LCA10 target position.

[0411] While not wishing to be bound by theory, in an embodiment, it is believed that the two double strand breaks allow for break-induced deletion of genomic sequence including the mutation at the LCA10 target position in the CEP290 gene.

[0412] The method also comprises the introduction of two sets of breaks, e.g., one double strand break (either 5′ or 3′ to the mutation at the LCA10 target position, e.g., c.2991+1655A to G) and a pair of single strand breaks (on the other side of the LCA10 target position opposite from the double strand break) such that the two sets of breaks are positioned to flank the LCA10 target position. Three gRNAs, e.g., unimolecular (or chimeric) or modular gRNA molecules, are configured to position the one double strand break and the pair of single strand breaks on opposite sides of the LCA10 target position in the CEP290 gene. In an embodiment, the first set of breaks (either the double strand break or the pair of single strand breaks) is positioned upstream of the LCA10 target position within intron 26 (e.g., within 1654 nucleotides), and the second set of breaks (either the double strand break or the pair of single strand breaks) are positioned downstream of the LCA10 target position within intron 26 (e.g., within 4183 nucleotides) (see FIG. 10). In an embodiment, the two sets of breaks (i.e., the double strand break and the pair of single strand breaks) are positioned to avoid unwanted target chromosome elements, such as repeat elements, e.g., an Alu repeat, or the endogenous CEP290 splice sites.

[0413] The first set of breaks (either the double strand break or the pair of single strand breaks) may be positioned:
[0414] (1) upstream of the 5′ end of the Alu repeat in intron 26,
[0415] (2) between the 3′ end of the Alu repeat and the LCA10 target position in intron 26, or
[0416] (3) within the Alu repeat provided that a sufficient length of the gRNA falls outside of the repeat so as to avoid binding to other Alu repeats in the genome, and the second set of breaks to be paired with the first set of breaks (either the double strand break or the pair of single strand breaks) may be positioned downstream of the LCA10 target position in intron 26.

[0417] For example, the first set of breaks (either the double strand break or the pair of single strand breaks) may be positioned:
[0418] (1) within 1162 nucleotides upstream of the 5′ end of the Alu repeat,
[0419] (2) within 1000 nucleotides upstream of the 5′ end of the Alu repeat,
[0420] (3) within 900 nucleotides upstream of the 5′ end of the Alu repeat,
[0421] (4) within 800 nucleotides upstream of the 5′ end of the Alu repeat,
[0422] (5) within 700 nucleotides upstream of the 5′ end of the Alu repeat,
[0423] (6) within 600 nucleotides upstream of the 5′ end of the Alu repeat,
[0424] (7) within 500 nucleotides upstream of the 5′ end of the Alu repeat,
[0425] (8) within 400 nucleotides upstream of the 5′ end of the Alu repeat,
[0426] (9) within 300 nucleotides upstream of the 5′ end of the Alu repeat,
[0427] (10) within 200 nucleotides upstream of the 5′ end of the Alu repeat,
[0428] (11) within 100 nucleotides upstream of the 5′ end of the Alu repeat,
[0429] (12) within 50 nucleotides upstream of the 5′ end of the Alu repeat,
[0430] (13) within the Alu repeat provided that a sufficient length of the gRNA falls outside of the repeat so as to avoid binding to other Alu repeats in the genome,
[0431] (14) within 40 nucleotides (e.g., within 1, 2, 3, 4, 5, 10, 15, 16, 17, 18, 19, 20, 25, 30, 35 or 40 nucleotides) upstream of the LCA10 target position, or
[0432] (15) within 17 nucleotides (e.g., within 1, 2, 3, 4, 5, 10, 15, 16 or 17 nucleotides) upstream of the LCA10 target position,
   and the second set of breaks to be paired with the first set of breaks (either the double strand break or the pair of single strand breaks) may be positioned:
[0433] (1) within 4183 nucleotides downstream of the LCA10 target position,
[0434] (2) within 4000 nucleotides downstream of the LCA10 target position,
[0435] (3) within 3000 nucleotides downstream of the LCA10 target position,
[0436] (4) within 2000 nucleotides downstream of the LCA10 target position,
[0437] (5) within 1000 nucleotides downstream of the LCA10 target position,
[0438] (6) within 700 nucleotides downstream of the LCA10 target position,
[0439] (7) within 500 nucleotides downstream of the LCA10 target position,
[0440] (8) within 300 nucleotides downstream of the LCA10 target position,
[0441] (9) within 100 nucleotides downstream of the LCA10 target position,
[0442] (10) within 60 nucleotides downstream of the LCA10 target position, or
[0443] (11) within 40 (e.g., 1, 2, 3, 4, 5, 10, 15, 20, 25, 30, 35 or 40 nucleotides) nucleotides downstream of the LCA10 target position.

[0444] While not wishing to be bound by theory, it is believed that the two sets of breaks (either the double strand break or the pair of single strand breaks) allow for break-induced deletion of genomic sequence including the mutation at the LCA10 target position in the CEP290 gene.

[0445] The method also comprises the introduction of two sets of breaks, e.g., two pairs of single strand breaks, wherein the two sets of single-stranded breaks are positioned to flank the LCA10 target position. In an embodiment, the first set of breaks (e.g., the first pair of single strand breaks) is 5′ to the mutation at the LCA10 target position (e.g., c.2991+1655A to G) and the second set of breaks (e.g., the second pair of single strand breaks) is 3′ to the mutation at the LCA10 target position. Four gRNAs, e.g., unimolecular (or chimeric) or modular gRNA molecules, are configured to position the two pairs of single strand breaks on opposite sides of the LCA10 target position in the CEP290 gene. In an embodiment, the first set of breaks (e.g., the first pair of single strand breaks) is positioned upstream of the LCA10 target position within intron 26 (e.g., within 1654 nucleotides), and the second set of breaks (e.g., the second pair of single strand breaks) is positioned downstream of the LCA10 target position within intron 26 (e.g., within 4183 nucleotides) (see FIG. 10). In an embodiment, the two sets of breaks (i.e., the two pairs of single strand breaks) are positioned to avoid unwanted target chromosome elements, such as repeat elements, e.g., an Alu repeat, or the endogenous CEP290 splice sites.

[0446] The first set of breaks (e.g., the first pair of single strand breaks) may be positioned:
[0447] (1) upstream of the 5′ end of the Alu repeat in intron 26,
[0448] (2) between the 3′ end of the Alu repeat and the LCA10 target position in intron 26, or
[0449] (3) within the Alu repeat provided that a sufficient length of the gRNA falls outside of the repeat so as to avoid binding to other Alu repeats in the genome,
   and the second set of breaks to be paired with the first set of breaks (e.g., the second pair of single strand breaks) may be positioned downstream of the LCA10 target position in intron 26.

[0450] For example, the first set of breaks (e.g., the first pair of single strand breaks) may be positioned:
[0451] (1) within 1162 nucleotides upstream of the 5′ end of the Alu repeat,
[0452] (2) within 1000 nucleotides upstream of the 5′ end of the Alu repeat,
[0453] (3) within 900 nucleotides upstream of the 5′ end of the Alu repeat,
[0454] (4) within 800 nucleotides upstream of the 5′ end of the Alu repeat,
[0455] (5) within 700 nucleotides upstream of the 5′ end of the Alu repeat,
[0456] (6) within 600 nucleotides upstream of the 5′ end of the Alu repeat,
[0457] (7) within 500 nucleotides upstream of the 5′ end of the Alu repeat,
[0458] (8) within 400 nucleotides upstream of the 5′ end of the Alu repeat,
[0459] (9) within 300 nucleotides upstream of the 5′ end of the Alu repeat,
[0460] (10) within 200 nucleotides upstream of the 5′ end of the Alu repeat,
[0461] (11) within 100 nucleotides upstream of the 5′ end of the Alu repeat,
[0462] (12) within 50 nucleotides upstream of the 5′ end of the Alu repeat,
[0463] (13) within the Alu repeat provided that a sufficient length of the gRNA falls outside of the repeat so as to avoid binding to other Alu repeats in the genome,
[0464] (14) within 40 nucleotides (e.g., within 1, 2, 3, 4, 5, 10, 15, 16, 17, 18, 19, 20, 25, 30, 35 or 40 nucleotides) upstream of the LCA10 target position, or
[0465] (15) within 17 nucleotides (e.g., within 1, 2, 3, 4, 5, 10, 15, 16 or 17 nucleotides) upstream of the LCA10 target position,
   and the second set of breaks to be paired with the first set of breaks (e.g., the second pair of single strand breaks) may be positioned:
[0466] (1) within 4183 nucleotides downstream of the LCA10 target position,
[0467] (2) within 4000 nucleotides downstream of the LCA10 target position,
[0468] (3) within 3000 nucleotides downstream of the LCA10 target position,
[0469] (4) within 2000 nucleotides downstream of the LCA10 target position,
[0470] (5) within 1000 nucleotides downstream of the LCA10 target position,
[0471] (6) within 700 nucleotides downstream of the LCA10 target position,
[0472] (7) within 500 nucleotides downstream of the LCA10 target position,
[0473] (8) within 300 nucleotides downstream of the LCA10 target position,
[0474] (9) within 100 nucleotides downstream of the LCA10 target position,
[0475] (10) within 60 nucleotides downstream of the LCA10 target position, or
[0476] (11) within 40 (e.g., 1, 2, 3, 4, 5, 10, 15, 20, 25, 30, 35 or 40 nucleotides) nucleotides downstream of the LCA10 target position.

[0477] While not wishing to be bound by theory, it is believed that the two sets of breaks (e.g., the two pairs of single strand breaks) allow for break-induced deletion of genomic sequence including the mutation at the LCA10 target position in the CEP290 gene.

### Methods of Treating or Preventing LCA10

[0478] Described herein are methods for treating or delaying the onset or progression of Leber's Congenital Amaurosis 10 (LCA10) caused by a c.2991+1655 A to G (adenine to guanine) mutation in the CEP290 gene. The disclosed methods for treating or delaying the onset or progression of LCA10 alter the CEP290 gene by genome editing using a gRNA targeting the LCA10 target position and a Cas9 enzyme. Details on gRNAs targeting the LCA10 target position and Cas9 enzymes are provided below.

[0479] In an embodiment, treatment is initiated prior to onset of the disease.

[0480] In an embodiment, treatment is initiated after onset of the disease.

[0481] In an embodiment, treatment is initiated prior to loss of visual acuity and/or sensitivity to glare.

[0482] In an embodiment, treatment is initiated at onset of loss of visual acuity.

[0483] In an embodiment, treatment is initiated after onset of loss of visual acuity and/or sensitivity to glare.

[0484] In an embodiment, treatment is initiated in utero.

[0485] In an embodiment, treatment is initiated after birth.

[0486] In an embodiment, treatment is initiated prior to the age of 1.

[0487] In an embodiment, treatment is initiated prior to the age of 2.

[0488] In an embodiment, treatment is initiated prior to the age of 5.

[0489] In an embodiment, treatment is initiated prior to the age of 10.

[0490] In an embodiment, treatment is initiated prior to the age of 15.

[0491] In an embodiment, treatment is initiated prior to the age of 20.

[0492] A subject's vision can evaluated, e.g., prior to treatment, or after treatment, e.g., to monitor the progress of the treatment. In an embodiment, the subject's vision is evaluated prior to treatment, e.g., to determine the need for treatment. In an embodiment, the subject's vision is evaluated after treatment has been initiated, e.g., to access the effectiveness of the treatment. Vision can be evaluated by one or more of: evaluating changes in function relative to the contralateral eye, e.g., by utilizing retinal analytical techniques; by evaluating mean, median and distribution of change in best corrected visual acuity (BCVA); evaluation by Optical Coherence Tomography; evaluation of changes in visual field using perimetry; evaluation by full-field electroretinography (ERG); evaluation by slit lamp examination; evaluation of intraocular pressure; evaluation of autofluorescence, evaluation with fundoscopy; evaluation with fundus photography; evaluation with fluorescein angiography (FA); or evaluation of visual field sensitivity (FFST).

[0493] In an embodiment, a subject's vision may be assessed by measuring the subject's mobility, e.g., the subject's ability to maneuver in space.

[0494] In an embodiment, treatment is initiated in a subject who has tested positive for a mutation in the CEP290 gene, e.g., prior to disease onset or in the earliest stages of disease.

[0495] In an embodiment, a subject has a family member that has been diagnosed with LCA10. For example, the subject has a family member that has been diagnosed with LCA10, and the subject demonstrates a symptom or sign of the disease or has been found to have a mutation in the CEP290 gene.

[0496] In an embodiment, a cell (e.g., a retinal cell, e.g., a photoreceptor cell) from a subject suffering from or likely to develop LCA10 is treated ex vivo. In an embodiment, the cell is removed from the subject, altered as described herein, and introduced into, e.g., returned to, the subject.

[0497] In an embodiment, a cell (e.g., a retinal cell, e.g., a photoreceptor cell) altered to correct a mutation in the LCA10 target position is introduced into the subject.

[0498] In an embodiment, the cell is a retinal cell (e.g., retinal pigment epithelium cell), a photoreceptor cell, a horizontal cell, a bipolar cell, an amacrine cell, or a ganglion cell. In an embodiment, it is contemplated herein that a population of cells (e.g., a population of retinal cells, e.g., a population of photoreceptor cells) from a subject may be contacted ex vivo to alter a mutation in CEP290, e.g., a 2991+1655 A to G. In an embodiment, such cells are introduced to the subject's body to prevent or treat LCA10.

[0499] In an embodiment, the population of cells are a population of retinal cells (e.g., retinal pigment epithelium cells), photoreceptor cells, horizontal cells, bipolar cells, amacrine cells, ganglion cells, or a combination thereof.

[0500] In an embodiment, the method described herein comprises delivery of gRNA or other components described herein, e.g., a Cas9 molecule, by one or more AAV vectors, e.g., one or more AAV vectors described herein.

### I. Genome Editing Systems

[0501] The term “genome editing system” refers to any system having RNA-guided DNA editing activity. Genome editing systems of the present disclosure include at least two components adapted from naturally occurring CRISPR systems: a gRNA and an RNA-guided nuclease. These two components form a complex that is capable of associating with a specific nucleic acid sequence in a cell and editing the DNA in or around that nucleic acid sequence, for example by making one or more of a single-strand break (an SSB or nick), a double-strand break (a DSB) and/or a base substitution.

[0502] Naturally occurring CRISPR systems are organized evolutionarily into two classes and five types (Makarova 2011, incorporated by reference herein), and while genome editing systems of the present disclosure may adapt components of any type or class of naturally occurring CRISPR system, the embodiments presented herein are generally adapted from Class 2, and type II or V CRISPR systems. Class 2 systems, which encompass types II and V, are characterized by relatively large, multidomain RNA-guided nuclease proteins (e.g., Cas9 or Cpf1) that form ribonucleoprotein (RNP) complexes with gRNAs. gRNAs, which are discussed in greater detail below, can include single crRNAs in the case of Cpf1 or duplexed crRNAs and tracrRNAs in the case of Cas9. RNP complexes, in turn, associate with (i.e., target) and cleave specific loci complementary to a targeting (or spacer) sequence of the crRNA. Genome editing systems according to the present disclosure similarly target and edit cellular DNA sequences. but differ significantly from CRISPR systems occurring in nature. For example, the unimolecular gRNAs described herein do not occur in nature, and both gRNAs and RNA-guided nucleases according to this disclosure can incorporate any number of non-naturally occurring modifications.

[0503] Genome editing systems can be implemented in a variety of ways, and different implementations may be suitable for any particular application. For example, a genome editing system is implemented, in certain embodiments, as a protein/RNA complex (a ribonucleoprotein, or RNP), which can be included in a pharmaceutical composition that optionally includes a pharmaceutically acceptable carrier and/or an encapsulating agent, such as a lipid or polymer micro- or nano-particle, micelle, liposome, etc. In other embodiments, a genome editing system is implemented as one or more nucleic acids encoding the RNA-guided nuclease and gRNA components described above (optionally with one or more additional components); in still other embodiments, the genome editing system is implemented as one or more vectors comprising such nucleic acids, for example a viral vector such as an AAV; and in still other embodiments, the genome editing system is implemented as a combination of any of the foregoing. Additional or modified implementations that operate according to the principles set forth herein will be apparent to the skilled artisan and are within the scope of this disclosure.

[0504] It should be noted that the genome editing systems of the present invention can be targeted to a single specific nucleotide sequence, or can be targeted to—and capable of editing in parallel—two or more specific nucleotide sequences through the use of two or more gRNAs. The use of two or more gRNAs targeted to different sites is referred to as “multiplexing” throughout this disclosure, and can be employed to target multiple, unrelated target sequences of interest, or to form multiple SSBs and/or DSBs within a single target domain and, in some cases, to generate specific edits within such target domain. For example, this disclosure and International Patent Publication No. WO2015/138510 by Maeder et al. (“Maeder”), which is incorporated by reference herein, both describe a genome editing system for correcting a point mutation (C.2991+1655A to G) in the human CEP290 gene that results in the creation of a cryptic splice site, which in turn reduces or eliminates the function of the gene. The genome editing system of Maeder utilizes two gRNAs targeted to sequences on either side of (i.e., flanking) the point mutation, and forms DSBs that flank the mutation. This, in turn, promotes deletion of the intervening sequence, including the mutation, thereby eliminating the cryptic splice site and restoring normal gene function.

[0505] As another example, International Patent Publication No. WO2016/073990 by Cotta-Ramusino et al. (“Cotta-Ramusino”), incorporated by reference herein, describes a genome editing system that utilizes two gRNAs in combination with a Cas9 nickase (a Cas9 that makes a single strand nick such as S. pyogenes D10A), an arrangement termed a “dual-nickase system.” The dual-nickase system of Cotta-Ramusino is configured to make two nicks on opposite strands of a sequence of interest that are offset by one or more nucleotides, which nicks combine to create a double strand break having an overhang (5′ in the case of Cotta-Ramusino, though 3′ overhangs are also possible). The overhang, in turn, can facilitate homology directed repair events in some circumstances. As another example, International Patent Publication No. WO2015/070083 by Zhang et al., incorporated by reference herein, describes a gRNA targeted to a nucleotide sequence encoding Cas9 (referred to as a “governing” gRNA), which can be included in a genome editing system comprising one or more additional gRNAs to permit transient expression of a Cas9 that might otherwise be constitutively expressed, for example in some virally transduced cells. These multiplexing applications are intended to be exemplary, rather than limiting, and the skilled artisan will appreciate that other applications of multiplexing are generally compatible with the genome editing systems described here.

[0506] Genome editing systems can, in some instances, form double strand breaks that are repaired by cellular DNA double-strand break mechanisms such as non-homologous end joining (NHEJ), or homology directed repair (HDR). These mechanisms are described throughout the literature (see, e.g., Davis 2014 (describing Alt-HDR), Frit 2014 (describing Alt-NHEJ), and Iyama 2013 (describing canonical HDR and NHEJ pathways generally), all of which are incorporated by reference herein).

[0507] Where genome editing systems operate by forming DSBs, such systems optionally include one or more components that promote or facilitate a particular mode of double-strand break repair or a particular repair outcome. For example, Cotta-Ramusino also describes genome editing systems in which a single stranded oligonucleotide “donor template” is added; the donor template is incorporated into a target region of cellular DNA that is cleaved by the genome editing system, and can result in a change in the target sequence.

[0508] In other cases, genome editing systems modify a target sequence, or modify expression of a gene in or near the target sequence, without causing single- or double-strand breaks. For example, a genome editing system can include an RNA-guided nuclease/cytidine deaminase fusion protein, and can operate by generating targeted C-to-A substitutions. Suitable nuclease/deaminase fusions are described in Komor 2016, which is incorporated by reference. Alternatively, a genome editing system can utilize a cleavage-inactivated (i.e., a “dead”) nuclease, such as a dead Cas9, and can operate by forming stable complexes on one or more targeted regions of cellular DNA, thereby interfering with functions involving the targeted region(s) such as mRNA transcription and chromatin remodeling.

II. gRNA Molecules

[0509] The terms guide RNA and gRNA refer to any nucleic acid that promotes the specific association (or “targeting”) of an RNA-guided nuclease such as a Cas9 or a Cpf1 to a target sequence such as a genomic or episomal sequence in a cell. gRNAs can be unimolecular (comprising a single RNA molecule, and referred to alternatively as chimeric), or modular (comprising more than one, and typically two, separate RNA molecules, such as a crRNA and a tracrRNA, which are usually associated with one another, for example by duplexing). gRNAs and their component parts are described throughout the literature (see, e.g., Briner 2014, which is incorporated by reference; see also Cotta-Ramusino).

[0510] In bacteria and archea, type II CRISPR systems generally comprise an RNA-guided nuclease protein such as Cas9, a CRISPR RNA (crRNA) that includes a 5′ region that is complementary to a foreign sequence, and a trans-activating crRNA (tracrRNA) that includes a 5′ region that is complementary to, and forms a duplex with, a 3′ region of the crRNA. While not intending to be bound by any theory, it is thought that this duplex facilitates the formation of—and is necessary for the activity of—the Cas9/gRNA complex. As type II CRISPR systems were adapted for use in gene editing, it was discovered that the crRNA and tracrRNA could be joined into a single unimolecular or chimeric gRNA, for example by means of a four nucleotide (e.g., GAAA) “tetraloop” or “linker” sequence bridging complementary regions of the crRNA (at its 3′ end) and the tracrRNA (at its 5′ end) (Mali 2013; Jiang 2013; Jinek 2012; all incorporated by reference herein).

[0511] gRNAs, whether unimolecular or modular, include a targeting domain that is fully or partially complementary to a target domain within a target sequence, such as a DNA sequence in the genome of a cell where editing is desired. In certain embodiments, this target sequence encompasses or is proximal to a CEP290 target position. Targeting domains are referred to by various names in the literature, including without limitation “guide sequences” (Hsu 2013, incorporated by reference herein), “complementarity regions” (Cotta-Ramusino), “spacers” (Briner 2014), and generically as “crRNAs” (Jiang 2013). Irrespective of the names they are given, targeting domains are typically 10-30 nucleotides in length, preferably 16-24 nucleotides in length (for example, 16, 17, 18, 19, 20, 21, 22, 23 or 24 nucleotides in length), and are at or near the 5′ terminus of in the case of a Cas9 gRNA, and at or near the 3′ terminus in the case of a Cpf1 gRNA.

[0512] In addition to the targeting domains, gRNAs typically (but not necessarily, as discussed below) include a plurality of domains that influence the formation or activity of gRNA/Cas9 complexes. For example, as mentioned above, the duplexed structure formed by first and secondary complementarity domains of a gRNA (also referred to as a repeat:anti-repeat duplex) interacts with the recognition (REC) lobe of Cas9 and may mediate the formation of Cas9/gRNA complexes (Nishimasu 2014; Nishimasu 2015; both incorporated by reference herein). It should be noted that the first and/or second complementarity domains can contain one or more poly-A tracts, which can be recognized by RNA polymerases as a termination signal. The sequence of the first and second complementarity domains are, therefore, optionally modified to eliminate these tracts and promote the complete in vitro transcription of gRNAs, for example through the use of A-G swaps as described in Briner 2014, or A-U swaps. These and other similar modifications to the first and second complementarity domains are within the scope of the present disclosure.

[0513] Along with the first and second complementarity domains, Cas9 gRNAs typically include two or more additional duplexed regions that are necessary for nuclease activity in vivo but not necessarily in vitro (Nishimasu 2015). A first stem-loop near the 3′ portion of the second complementarity domain is referred to variously as the “proximal domain” (Cotta-Ramusino) “stem loop 1” (Nishimasu 2014; Nishimasu 2015) and the “nexus” (Briner 2014). One or more additional stem loop structures are generally present near the 3′ end of the gRNA, with the number varying by species: S. pyogenes gRNAs typically include two 3′ stem loops (for a total of four stem loop structures including the repeat:anti-repeat duplex), while s. aureus and other species have only one (for a total of three). A description of conserved stem loop structures (and gRNA structures more generally) organized by species is provided in Briner 2014.

[0514] Skilled artisans will appreciate that gRNAs can be modified in a number of ways, some of which are described below, and these modifications are within the scope of disclosure. For economy of presentation in this disclosure, gRNAs may be presented by reference solely to their targeting domain sequences.

[0515] A gRNA molecule comprises a number of domains. The gRNA molecule domains are described in more detail below.

[0516] Several exemplary gRNA structures, with domains indicated thereon, are provided in FIG. 1. While not wishing to be bound by theory, with regard to the three dimensional form, or intra- or inter-strand interactions of an active form of a gRNA, regions of high complementarity are sometimes shown as duplexes in FIG. 1 and other depictions provided herein.

[0517] In an embodiment, a unimolecular, or chimeric, gRNA comprises, preferably from 5′ to 3′:
[0518] a targeting domain (which is complementary to a target nucleic acid in the CEP290 gene, e.g., a targeting domain from any of Tables 2A-2D, Tables 3A-3C, Tables 4A-4D, Tables 5A-5D, Tables 6A-6B, Tables 7A-7D, Tables 8A-8D, Tables 9A-9E, Tables 10A-10B, or Table 11);
[0519] a first complementarity domain;
[0520] a linking domain;
[0521] a second complementarity domain (which is complementary to the first complementarity domain);
[0522] a proximal domain; and
[0523] optionally, a tail domain.

[0524] In an embodiment, a modular gRNA comprises:
[0525] a first strand comprising, preferably from 5′ to 3′;
   [0526] a targeting domain (which is complementary to a target nucleic acid in the CEP290 gene, e.g., a targeting domain from Tables 2A-2D, Tables 3A-3C, Tables 4A-4D, Tables 5A-5D, Tables 6A-6B, Tables 7A-7D, Tables 8A-8D, Tables 9A-9E, Tables 10A-10B, or Table 11); and
   [0527] a first complementarity domain; and
[0528] a second strand, comprising, preferably from 5′ to 3′:
   [0529] optionally, a 5′ extension domain;
   [0530] a second complementarity domain;
   [0531] a proximal domain; and
   [0532] optionally, a tail domain.

[0533] The domains are discussed briefly below.

### Targeting Domain

[0534] FIGS. 1A-1G provide examples of the placement of targeting domains.

[0535] The targeting domain comprises a nucleotide sequence that is complementary, e.g., at least 80, 85, 90, or 95% complementary, e.g., fully complementary, to the target sequence on the target nucleic acid. The targeting domain is part of an RNA molecule and will therefore comprise the base uracil (U), while any DNA encoding the gRNA molecule will comprise the base thymine (T). While not wishing to be bound by theory, in an embodiment, it is believed that the complementarity of the targeting domain with the target sequence contributes to specificity of the interaction of the gRNA molecule/Cas9 molecule complex with a target nucleic acid. It is understood that in a targeting domain and target sequence pair, the uracil bases in the targeting domain will pair with the adenine bases in the target sequence. In an embodiment, the target domain itself comprises in the 5′ to 3′ direction, an optional secondary domain, and a core domain. In an embodiment, the core domain is fully complementary with the target sequence.

[0536] In an embodiment, the targeting domain is 5 to 50 nucleotides in length. The strand of the target nucleic acid with which the targeting domain is complementary is referred to herein as the complementary strand. Some or all of the nucleotides of the domain can have a modification, e.g., a modification found in Section VIII herein.

[0537] In an embodiment, the targeting domain is 16 nucleotides in length.

[0538] In an embodiment, the targeting domain is 17 nucleotides in length.

[0539] In an embodiment, the targeting domain is 18 nucleotides in length.

[0540] In an embodiment, the targeting domain is 19 nucleotides in length.

[0541] In an embodiment, the targeting domain is 20 nucleotides in length.

[0542] In an embodiment, the targeting domain is 21 nucleotides in length.

[0543] In an embodiment, the targeting domain is 22 nucleotides in length.

[0544] In an embodiment, the targeting domain is 23 nucleotides in length.

[0545] In an embodiment, the targeting domain is 24 nucleotides in length.

[0546] In an embodiment, the targeting domain is 25 nucleotides in length.

[0547] In an embodiment, the targeting domain is 26 nucleotides in length.

[0548] In an embodiment, the targeting domain comprises 16 nucleotides.

[0549] In an embodiment, the targeting domain comprises 17 nucleotides.

[0550] In an embodiment, the targeting domain comprises 18 nucleotides.

[0551] In an embodiment, the targeting domain comprises 19 nucleotides.

[0552] In an embodiment, the targeting domain comprises 20 nucleotides.

[0553] In an embodiment, the targeting domain comprises 21 nucleotides.

[0554] In an embodiment, the targeting domain comprises 22 nucleotides.

[0555] In an embodiment, the targeting domain comprises 23 nucleotides.

[0556] In an embodiment, the targeting domain comprises 24 nucleotides.

[0557] In an embodiment, the targeting domain comprises 25 nucleotides.

[0558] In an embodiment, the targeting domain comprises 26 nucleotides.

[0559] Targeting domains are discussed in more detail below.

### First Complementarity Domain

[0560] FIGS. 1A-1G provide examples of first complementarity domains.

[0561] The first complementarity domain is complementary with the second complementarity domain, and in an embodiment, has sufficient complementarity to the second complementarity domain to form a duplexed region under at least some physiological conditions. In an embodiment, the first complementarity domain is 5 to 30 nucleotides in length. In an embodiment, the first complementarity domain is 5 to 25 nucleotides in length. In an embodiment, the first complementary domain is 7 to 25 nucleotides in length. In an embodiment, the first complementary domain is 7 to 22 nucleotides in length. In an embodiment, the first complementary domain is 7 to 18 nucleotides in length. In an embodiment, the first complementary domain is 7 to 15 nucleotides in length. In an embodiment, the first complementary domain is 5, 6, 7, 8, 9, 10, 11, 12, 13, 14, 15, 16, 17, 18, 19, 20, 21, 22, 23, 24, or 25 nucleotides in length.

[0562] In an embodiment, the first complementarity domain comprises 3 subdomains, which, in the 5′ to 3′ direction are: a 5′ subdomain, a central subdomain, and a 3′ subdomain. In an embodiment, the 5′ subdomain is 4-9, e.g., 4, 5, 6, 7, 8 or 9 nucleotides in length. In an embodiment, the central subdomain is 1, 2, or 3, e.g., 1, nucleotide in length. In an embodiment, the 3′ subdomain is 3 to 25, e.g., 4-22, 4-18, or 4 to 10, or 3, 4, 5, 6, 7, 8, 9, 10, 11, 12, 13, 14, 15, 16, 17, 18, 19, 20, 21, 22, 23, 24, or 25, nucleotides in length.

[0563] The first complementarity domain can share homology with, or be derived from, a naturally occurring first complementarity domain. In an embodiment, it has at least 50% homology with a first complementarity domain disclosed herein, e.g., an S. pyogenes, S. aureus, or S. thermophilus, first complementarity domain.

[0564] Some or all of the nucleotides of the domain can have a modification, e.g., a modification found in Section VIII herein.

[0565] First complementarity domains are discussed in more detail below.

### Linking Domain

[0566] FIGS. 1A-1G provide examples of linking domains.

[0567] A linking domain serves to link the first complementarity domain with the second complementarity domain of a unimolecular gRNA. The linking domain can link the first and second complementarity domains covalently or non-covalently. In an embodiment, the linkage is covalent. In an embodiment, the linking domain covalently couples the first and second complementarity domains, see, e.g., FIGS. 1B-1E. In an embodiment, the linking domain is, or comprises, a covalent bond interposed between the first complementarity domain and the second complementarity domain. Typically the linking domain comprises one or more, e.g., 2, 3, 4, 5, 6, 7, 8, 9, or 10 nucleotides.

[0568] In modular gRNA molecules the two molecules are associated by virtue of the hybridization of the complementarity domains see e.g., FIG. 1A.

[0569] A wide variety of linking domains are suitable for use in unimolecular gRNA molecules. Linking domains can consist of a covalent bond, or be as short as one or a few nucleotides, e.g., 1, 2, 3, 4, or 5 nucleotides in length. In an embodiment, a linking domain is 2, 3, 4, 5, 6, 7, 8, 9, 10, 15, 20, or 25 or more nucleotides in length. In an embodiment, a linking domain is 2 to 50, 2 to 40, 2 to 30, 2 to 20, 2 to 10, or 2 to 5 nucleotides in length. In an embodiment, a linking domain shares homology with, or is derived from, a naturally occurring sequence, e.g., the sequence of a tracrRNA that is 5′ to the second complementarity domain. In an embodiment, the linking domain has at least 50% homology with a linking domain disclosed herein.

[0570] Some or all of the nucleotides of the domain can have a modification, e.g., a modification found in Section VIII herein.

[0571] Linking domains are discussed in more detail below.

### 5′ Extension Domain

[0572] In an embodiment, a modular gRNA can comprise additional sequence, 5′ to the second complementarity domain, referred to herein as the 5′ extension domain, see, e.g., FIG. 1A. In an embodiment, the 5′ extension domain is, 2-10, 2-9, 2-8, 2-7, 2-6, 2-5, or 2-4 nucleotides in length. In an embodiment, the 5′ extension domain is 2, 3, 4, 5, 6, 7, 8, 9, or 10 or more nucleotides in length.

### Second Complementarity Domain

[0573] FIGS. 1A-1G provide examples of second complementarity domains.

[0574] The second complementarity domain is complementary with the first complementarity domain, and in an embodiment, has sufficient complementarity to the second complementarity domain to form a duplexed region under at least some physiological conditions. In an embodiment, e.g., as shown in FIGS. 1A-1B, the second complementarity domain can include sequence that lacks complementarity with the first complementarity domain, e.g., sequence that loops out from the duplexed region.

[0575] In an embodiment, the second complementarity domain is 5 to 27 nucleotides in length. In an embodiment, it is longer than the first complementarity region. In an embodiment the second complementary domain is 7 to 27 nucleotides in length. In an embodiment, the second complementary domain is 7 to 25 nucleotides in length. In an embodiment, the second complementary domain is 7 to 20 nucleotides in length. In an embodiment, the second complementary domain is 7 to 17 nucleotides in length. In an embodiment, the complementary domain is 5, 6, 7, 8, 9, 10, 11, 12, 13, 14, 15, 16, 17, 18, 19, 20, 21, 22, 23, 24, 25 or 26 nucleotides in length.

[0576] In an embodiment, the second complementarity domain comprises 3 subdomains, which, in the 5′ to 3′ direction are: a 5′ subdomain, a central subdomain, and a 3′ subdomain. In an embodiment, the 5′ subdomain is 3 to 25, e.g., 4 to 22, 4 to 18, or 4 to 10, or 3, 4, 5, 6, 7, 8, 9, 10, 11, 12, 13, 14, 15, 16, 17, 18, 19, 20, 21, 22, 23, 24, or 25 nucleotides in length. In an embodiment, the central subdomain is 1, 2, 3, 4 or 5, e.g., 3, nucleotides in length. In an embodiment, the 3′ subdomain is 4 to 9, e.g., 4, 5, 6, 7, 8 or 9 nucleotides in length.

[0577] In an embodiment, the 5′ subdomain and the 3′ subdomain of the first complementarity domain, are respectively, complementary, e.g., fully complementary, with the 3′ subdomain and the 5′ subdomain of the second complementarity domain.

[0578] The second complementarity domain can share homology with or be derived from a naturally occurring second complementarity domain. In an embodiment, it has at least 50% homology with a second complementarity domain disclosed herein, e.g., an S. pyogenes, S. aureus, or S. thermophilus, first complementarity domain.

[0579] Some or all of the nucleotides of the domain can have a modification, e.g., a modification found in Section VIII herein.

### Proximal Domain

[0580] FIGS. 1A-1G provide examples of proximal domains.

[0581] In an embodiment, the proximal domain is 5 to 20 nucleotides in length. In an embodiment, the proximal domain can share homology with or be derived from a naturally occurring proximal domain. In an embodiment, it has at least 50% homology with a proximal domain disclosed herein, e.g., an S. pyogenes, S. aureus, or S. thermophilus, proximal domain.

[0582] Some or all of the nucleotides of the domain can have a modification, e.g., a modification found in Section VIII herein.

### Tail Domain

[0583] FIGS. 1A-1G provide examples of tail domains.

[0584] As can be seen by inspection of the tail domains in FIGS. 1A and 1B-1F, a broad spectrum of tail domains are suitable for use in gRNA molecules. In an embodiment, the tail domain is 0 (absent), 1, 2, 3, 4, 5, 6, 7, 8, 9, or 10 nucleotides in length. In embodiment, the tail domain nucleotides are from or share homology with sequence from the 5′ end of a naturally occurring tail domain, see e.g., FIG. 1D or 1E. In an embodiment, the tail domain includes sequences that are complementary to each other and which, under at least some physiological conditions, form a duplexed region.

[0585] In an embodiment, the tail domain is absent or is 1 to 50 nucleotides in length. In an embodiment, the tail domain can share homology with or be derived from a naturally occurring proximal tail domain. In an embodiment, it has at least 50% homology with a tail domain disclosed herein, e.g., an S. pyogenes, S. aureus, or S. thermophilus, tail domain.

[0586] In an embodiment, the tail domain includes nucleotides at the 3′ end that are related to the method of in vitro or in vivo transcription. When a T7 promoter is used for in vitro transcription of the gRNA, these nucleotides may be any nucleotides present before the 3′ end of the DNA template. When a U6 promoter is used for in vivo transcription, these nucleotides may be the sequence UUUUUU. When alternate pol-III promoters are used, these nucleotides may be various numbers or uracil bases or may include alternate bases.

[0587] The domains of gRNA molecules are described in more detail below.

### Targeting Domain

[0588] The “targeting domain” of the gRNA is complementary to the “target domain” on the target nucleic acid. The strand of the target nucleic acid comprising the core domain target is referred to herein as the “complementary strand” of the target nucleic acid. Guidance on the selection of targeting domains can be found, e.g., in Fu 2014 and Sternberg 2014.

[0589] In an embodiment, the targeting domain is 16, 17, 18, 19, 20, 21, 22, 23, 24, 25 or 26 nucleotides in length. In the figures and sequence listing provided herein, targeting domains are generally shown with 20 nucleotides. In each of these instances, the targeting domain may actually be shorter or longer as disclosed herein, for example from 16 to 26 nucleotides.

[0590] In an embodiment, the targeting domain is 16 nucleotides in length.

[0591] In an embodiment, the targeting domain is 17 nucleotides in length.

[0592] In an embodiment, the targeting domain is 18 nucleotides in length.

[0593] In an embodiment, the targeting domain is 19 nucleotides in length.

[0594] In an embodiment, the targeting domain is 20 nucleotides in length.

[0595] In an embodiment, the targeting domain is 21 nucleotides in length.

[0596] In an embodiment, the targeting domain is 22 nucleotides in length.

[0597] In an embodiment, the targeting domain is 23 nucleotides in length.

[0598] In an embodiment, the targeting domain is 24 nucleotides in length.

[0599] In an embodiment, the targeting domain is 25 nucleotides in length.

[0600] In an embodiment, the targeting domain is 26 nucleotides in length.

[0601] In an embodiment, the targeting domain comprises 16 nucleotides.

[0602] In an embodiment, the targeting domain comprises 17 nucleotides.

[0603] In an embodiment, the targeting domain comprises 18 nucleotides.

[0604] In an embodiment, the targeting domain comprises 19 nucleotides.

[0605] In an embodiment, the targeting domain comprises 20 nucleotides.

[0606] In an embodiment, the targeting domain comprises 21 nucleotides.

[0607] In an embodiment, the targeting domain comprises 22 nucleotides.

[0608] In an embodiment, the targeting domain comprises 23 nucleotides.

[0609] In an embodiment, the targeting domain comprises 24 nucleotides.

[0610] In an embodiment, the targeting domain comprises 25 nucleotides.

[0611] In an embodiment, the targeting domain comprises 26 nucleotides.

[0612] In an embodiment, the targeting domain is 10+/−5, 20+/−5, 30+/−5, 40+/−5, 50+/−5, 60+/−5, 70+/−5, 80+/−5, 90+/−5, or 100+/−5 nucleotides, in length.

[0613] In an embodiment, the targeting domain is 20+/−5 nucleotides in length.

[0614] In an embodiment, the targeting domain is 20+/−10, 30+/−10, 40+/−10, 50+/−10, 60+/−10, 70+/−10, 80+/−10, 90+/−10, or 100+/−10 nucleotides, in length.

[0615] In an embodiment, the targeting domain is 30+/−10 nucleotides in length.

[0616] In an embodiment, the targeting domain is 10 to 100, 10 to 90, 10 to 80, 10 to 70, 10 to 60, 10 to 50, 10 to 40, 10 to 30, 10 to 20 or 10 to 15 nucleotides in length. In other embodiments, the targeting domain is 20 to 100, 20 to 90, 20 to 80, 20 to 70, 20 to 60, 20 to 50, 20 to 40, 20 to 30, or 20 to 25 nucleotides in length.

[0617] Typically the targeting domain has full complementarity with the target sequence. In some embodiments the targeting domain has or includes 1, 2, 3, 4, 5, 6, 7 or 8 nucleotides that are not complementary with the corresponding nucleotide of the targeting domain.

[0618] In an embodiment, the target domain includes 1, 2, 3, 4 or 5 nucleotides that are complementary with the corresponding nucleotide of the targeting domain within 5 nucleotides of its 5′ end. In an embodiment, the target domain includes 1, 2, 3, 4 or 5 nucleotides that are complementary with the corresponding nucleotide of the targeting domain within 5 nucleotides of its 3′ end.

[0619] In an embodiment, the target domain includes 1, 2, 3, or 4 nucleotides that are not complementary with the corresponding nucleotide of the targeting domain within 5 nucleotides of its 5′ end. In an embodiment, the target domain includes 1, 2, 3, or 4 nucleotides that are not complementary with the corresponding nucleotide of the targeting domain within 5 nucleotides of its 3′ end.

[0620] In an embodiment, the degree of complementarity, together with other properties of the gRNA, is sufficient to allow targeting of a Cas9 molecule to the target nucleic acid.

[0621] In some embodiments, the targeting domain comprises two consecutive nucleotides that are not complementary to the target domain (“non-complementary nucleotides”), e.g., two consecutive noncomplementary nucleotides that are within 5 nucleotides of the 5′ end of the targeting domain, within 5 nucleotides of the 3′ end of the targeting domain, or more than 5 nucleotides away from one or both ends of the targeting domain.

[0622] In an embodiment, no two consecutive nucleotides within 5 nucleotides of the 5′ end of the targeting domain, within 5 nucleotides of the 3′ end of the targeting domain, or within a region that is more than 5 nucleotides away from one or both ends of the targeting domain, are not complementary to the targeting domain.

[0623] In an embodiment, there are no noncomplementary nucleotides within 5 nucleotides of the 5′ end of the targeting domain, within 5 nucleotides of the 3′ end of the targeting domain, or within a region that is more than 5 nucleotides away from one or both ends of the targeting domain.

[0624] In an embodiment, the targeting domain nucleotides do not comprise modifications, e.g., modifications of the type provided in Section VIII. However, in an embodiment, the targeting domain comprises one or more modifications, e.g., modifications that it render it less susceptible to degradation or more bio-compatible, e.g., less immunogenic. By way of example, the backbone of the targeting domain can be modified with a phosphorothioate, or other modification(s) from Section VIII. In an embodiment, a nucleotide of the targeting domain can comprise a 2′ modification, e.g., a 2-acetylation, e.g., a 2′ methylation, or other modification(s) from Section VIII.

[0625] In some embodiments, the targeting domain includes 1, 2, 3, 4, 5, 6, 7 or 8 or more modifications. In an embodiment, the targeting domain includes 1, 2, 3, or 4 modifications within 5 nucleotides of its 5′ end. In an embodiment, the targeting domain comprises as many as 1, 2, 3, or 4 modifications within 5 nucleotides of its 3′ end.

[0626] In some embodiments, the targeting domain comprises modifications at two consecutive nucleotides, e.g., two consecutive nucleotides that are within 5 nucleotides of the 5′ end of the targeting domain, within 5 nucleotides of the 3′ end of the targeting domain, or more than 5 nucleotides away from one or both ends of the targeting domain.

[0627] In an embodiment, no two consecutive nucleotides are modified within 5 nucleotides of the 5′ end of the targeting domain, within 5 nucleotides of the 3′ end of the targeting domain, or within a region that is more than 5 nucleotides away from one or both ends of the targeting domain. In an embodiment, no nucleotide is modified within 5 nucleotides of the 5′ end of the targeting domain, within 5 nucleotides of the 3′ end of the targeting domain, or within a region that is more than 5 nucleotides away from one or both ends of the targeting domain.

[0628] Modifications in the targeting domain can be selected to not interfere with targeting efficacy, which can be evaluated by testing a candidate modification in the system described in Section V. gRNAs having a candidate targeting domain having a selected length, sequence, degree of complementarity, or degree of modification, can be evaluated in a system in Section V. The candidate targeting domain can be placed, either alone, or with one or more other candidate changes in a gRNA molecule/Cas9 molecule system known to be functional with a selected target and evaluated.

[0629] In some embodiments, all of the modified nucleotides are complementary to and capable of hybridizing to corresponding nucleotides present in the target domain. In other embodiments, 1, 2, 3, 4, 5, 6, 7 or 8 or more modified nucleotides are not complementary to or capable of hybridizing to corresponding nucleotides present in the target domain.

[0630] In an embodiment, the targeting domain comprises, preferably in the 5′→3′ direction: a secondary domain and a core domain. These domains are discussed in more detail below.

### Core Domain and Secondary Domain of the Targeting Domain

[0631] The “core domain” of the targeting domain is complementary to the “core domain target” on the target nucleic acid. In an embodiment, the core domain comprises about 8 to about 13 nucleotides from the 3′ end of the targeting domain (e.g., the most 3′ 8 to 13 nucleotides of the targeting domain).

[0632] In an embodiment, the secondary domain is absent or optional.

[0633] In an embodiment, the core domain and targeting domain, are independently, 6+/−2, 7+/−2, 8+/−2, 9+/−2, 10+/−2, 11+/−2, 12+/−2, 13+/−2, 14+/−2, 15+/−2, 16+−2, 17+/−2, or 18+/−2, nucleotides in length.

[0634] In an embodiment, the core domain and targeting domain, are independently, 10+/−2 nucleotides in length.

[0635] In an embodiment, the core domain and targeting domain, are independently, 10+/−4 nucleotides in length.

[0636] In an embodiment, the core domain and targeting domain, are independently, 6, 7, 8, 9, 10, 11, 12, 13, 14, 15, 16, 17, or 18, nucleotides in length.

[0637] In an embodiment, the core domain and targeting domain, are independently 3 to 20, 4 to 20, 5 to 20, 6 to 20, 7 to 20, 8 to 20, 9 to 20 10 to 20 or 15 to 20 nucleotides in length.

[0638] In an embodiment, the core domain and targeting domain, are independently 3 to 15, e.g., 6 to 15, 7 to 14, 7 to 13, 6 to 12, 7 to 12, 7 to 11, 7 to 10, 8 to 14, 8 to 13, 8 to 12, 8 to 11, 8 to 10 or 8 to 9 nucleotides in length.

[0639] The core domain is complementary with the core domain target. Typically the core domain has exact complementarity with the core domain target. In some embodiments, the core domain can have 1, 2, 3, 4 or 5 nucleotides that are not complementary with the corresponding nucleotide of the core domain. In an embodiment, the degree of complementarity, together with other properties of the gRNA, is sufficient to allow targeting of a Cas9 molecule to the target nucleic acid.

[0640] The “secondary domain” of the targeting domain of the gRNA is complementary to the “secondary domain target” of the target nucleic acid.

[0641] In an embodiment, the secondary domain is positioned 5′ to the core domain.

[0642] In an embodiment, the secondary domain is absent or optional.

[0643] In an embodiment, if the targeting domain is 26 nucleotides in length and the core domain (counted from the 3′ end of the targeting domain) is 8 to 13 nucleotides in length, the secondary domain is 12 to 17 nucleotides in length.

[0644] In an embodiment, if the targeting domain is 25 nucleotides in length and the core domain (counted from the 3′ end of the targeting domain) is 8 to 13 nucleotides in length, the secondary domain is 12 to 17 nucleotides in length.

[0645] In an embodiment, if the targeting domain is 24 nucleotides in length and the core domain (counted from the 3′ end of the targeting domain) is 8 to 13 nucleotides in length, the secondary domain is 11 to 16 nucleotides in length.

[0646] In an embodiment, if the targeting domain is 23 nucleotides in length and the core domain (counted from the 3′ end of the targeting domain) is 8 to 13 nucleotides in length, the secondary domain is 10 to 15 nucleotides in length.

[0647] In an embodiment, if the targeting domain is 22 nucleotides in length and the core domain (counted from the 3′ end of the targeting domain) is 8 to 13 nucleotides in length, the secondary domain is 9 to 14 nucleotides in length.

[0648] In an embodiment, if the targeting domain is 21 nucleotides in length and the core domain (counted from the 3′ end of the targeting domain) is 8 to 13 nucleotides in length, the secondary domain is 8 to 13 nucleotides in length.

[0649] In an embodiment, if the targeting domain is 20 nucleotides in length and the core domain (counted from the 3′ end of the targeting domain) is 8 to 13 nucleotides in length, the secondary domain is 7 to 12 nucleotides in length.

[0650] In an embodiment, if the targeting domain is 19 nucleotides in length and the core domain (counted from the 3′ end of the targeting domain) is 8 to 13 nucleotides in length, the secondary domain is 6 to 11 nucleotides in length.

[0651] In an embodiment, if the targeting domain is 18 nucleotides in length and the core domain (counted from the 3′ end of the targeting domain) is 8 to 13 nucleotides in length, the secondary domain is 5 to 10 nucleotides in length.

[0652] In an embodiment, if the targeting domain is 17 nucleotides in length and the core domain (counted from the 3′ end of the targeting domain) is 8 to 13 nucleotides in length, the secondary domain is 4 to 9 nucleotides in length.

[0653] In an embodiment, if the targeting domain is 16 nucleotides in length and the core domain (counted from the 3′ end of the targeting domain) is 8 to 13 nucleotides in length, the secondary domain is 3 to 8 nucleotides in length.

[0654] In an embodiment, the secondary domain is 0, 1, 2, 3, 4, 5, 6, 7, 8, 9, 10, 11, 12, 13, 14 or 15 nucleotides in length.

[0655] The secondary domain is complementary with the secondary domain target. Typically the secondary domain has exact complementarity with the secondary domain target. In some embodiments the secondary domain can have 1, 2, 3, 4 or 5 nucleotides that are not complementary with the corresponding nucleotide of the secondary domain. In an embodiment, the degree of complementarity, together with other properties of the gRNA, is sufficient to allow targeting of a Cas9 molecule to the target nucleic acid.

[0656] In an embodiment, the core domain nucleotides do not comprise modifications, e.g., modifications of the type provided in Section VIII. However, in an embodiment, the core domain comprise one or more modifications, e.g., modifications that it render it less susceptible to degradation or more bio-compatible, e.g., less immunogenic. By way of example, the backbone of the core domain can be modified with a phosphorothioate, or other modification(s) from Section VIII. In an embodiment a nucleotide of the core domain can comprise a 2′ modification, e.g., a 2-acetylation, e.g., a 2′ methylation, or other modification(s) from Section VIII. Typically, a core domain will contain no more than 1, 2, or 3 modifications.

[0657] Modifications in the core domain can be selected to not interfere with targeting efficacy, which can be evaluated by testing a candidate modification in the system described in Section V. gRNA's having a candidate core domain having a selected length, sequence, degree of complementarity, or degree of modification, can be evaluated in the system described at Section V. The candidate core domain can be placed, either alone, or with one or more other candidate changes in a gRNA molecule/Cas9 molecule system known to be functional with a selected target and evaluated.

[0658] In an embodiment, the secondary domain nucleotides do not comprise modifications, e.g., modifications of the type provided in Section VIII. However, in an embodiment, the secondary domain comprises one or more modifications, e.g., modifications that it render it less susceptible to degradation or more bio-compatible, e.g., less immunogenic. By way of example, the backbone of the secondary domain can be modified with a phosphorothioate, or other modification(s) from Section VIII. In an embodiment a nucleotide of the secondary domain can comprise a 2′ modification, e.g., a 2-acetylation, e.g., a 2′ methylation, or other modification(s) from Section VIII. Typically, a secondary domain will contain no more than 1, 2, or 3 modifications.

[0659] Modifications in the secondary domain can be selected to not interfere with targeting efficacy, which can be evaluated by testing a candidate modification in the system described in Section V. gRNA's having a candidate secondary domain having a selected length, sequence, degree of complementarity, or degree of modification, can be evaluated in the system described at Section V. The candidate secondary domain can be placed, either alone, or with one or more other candidate changes in a gRNA molecule/Cas9 molecule system known to be functional with a selected target and evaluated.

[0660] In an embodiment, (1) the degree of complementarity between the core domain and its target, and (2) the degree of complementarity between the secondary domain and its target, may differ. In an embodiment, (1) may be greater (2). In an embodiment, (1) may be less than (2). In an embodiment, (1) and (2) are the same, e.g., each may be completely complementary with its target.

[0661] In an embodiment, (1) the number of modification (e.g., modifications from Section VIII) of the nucleotides of the core domain and (2) the number of modification (e.g., modifications from Section VIII) of the nucleotides of the secondary domain, may differ. In an embodiment, (1) may be less than (2). In an embodiment, (1) may be greater than (2). In an embodiment, (1) and (2) may be the same, e.g., each may be free of modifications.

### First and Second Complementarity Domains

[0662] The first complementarity domain is complementary with the second complementarity domain.

[0663] Typically the first domain does not have exact complementarity with the second complementarity domain target. In some embodiments, the first complementarity domain can have 1, 2, 3, 4 or 5 nucleotides that are not complementary with the corresponding nucleotide of the second complementarity domain. In an embodiment, 1, 2, 3, 4, 5 or 6, e.g., 3 nucleotides, will not pair in the duplex, and, e.g., form a non-duplexed or looped-out region. In an embodiment, an unpaired, or loop-out, region, e.g., a loop-out of 3 nucleotides, is present on the second complementarity domain. In an embodiment, the unpaired region begins 1, 2, 3, 4, 5, or 6, e.g., 4, nucleotides from the 5′ end of the second complementarity domain.

[0664] In an embodiment, the degree of complementarity, together with other properties of the gRNA, is sufficient to allow targeting of a Cas9 molecule to the target nucleic acid.

[0665] In an embodiment, the first and second complementarity domains are:

[0666] independently, 6+/−2, 7+/−2, 8+/−2, 9+/−2, 10+/−2, 11+/−2, 12+/−2, 13+/−2, 14+/−2, 15+/−2, 16+/−2, 17+/−2, 18+/−2, 19+/−2, or 20+/−2, 21+/−2, 22+/−2, 23+/−2, or 24+/−2 nucleotides in length;

[0667] independently, 6, 7, 8, 9, 10, 11, 12, 13, 14, 14, 16, 17, 18, 19, 20, 21, 22, 23, 24, 25, or 26, nucleotides in length; or

[0668] independently, 5 to 24, 5 to 23, 5 to 22, 5 to 21, 5 to 20, 7 to 18, 9 to 16, or 10 to 14 nucleotides in length.

[0669] In an embodiment, the second complementarity domain is longer than the first complementarity domain, e.g., 2, 3, 4, 5, or 6, e.g., 6, nucleotides longer.

[0670] In an embodiment, the first and second complementary domains, independently, do not comprise modifications, e.g., modifications of the type provided in Section VIII.

[0671] In an embodiment, the first and second complementary domains, independently, comprise one or more modifications, e.g., modifications that the render the domain less susceptible to degradation or more bio-compatible, e.g., less immunogenic. By way of example, the backbone of the domain can be modified with a phosphorothioate, or other modification(s) from Section VIII. In an embodiment a nucleotide of the domain can comprise a 2′ modification, e.g., a 2-acetylation, e.g., a 2′ methylation, or other modification(s) from Section VIII.

[0672] In an embodiment, the first and second complementary domains, independently, include 1, 2, 3, 4, 5, 6, 7 or 8 or more modifications. In an embodiment, the first and second complementary domains, independently, include 1, 2, 3, or 4 modifications within 5 nucleotides of its 5′ end. In an embodiment, the first and second complementary domains, independently, include as many as 1, 2, 3, or 4 modifications within 5 nucleotides of its 3′ end.

[0673] In an embodiment, the first and second complementary domains, independently, include modifications at two consecutive nucleotides, e.g., two consecutive nucleotides that are within 5 nucleotides of the 5′ end of the domain, within 5 nucleotides of the 3′ end of the domain, or more than 5 nucleotides away from one or both ends of the domain. In an embodiment, the first and second complementary domains, independently, include no two consecutive nucleotides that are modified, within 5 nucleotides of the 5′ end of the domain, within 5 nucleotides of the 3′ end of the domain, or within a region that is more than 5 nucleotides away from one or both ends of the domain. In an embodiment, the first and second complementary domains, independently, include no nucleotide that is modified within 5 nucleotides of the 5′ end of the domain, within 5 nucleotides of the 3′ end of the domain, or within a region that is more than 5 nucleotides away from one or both ends of the domain.

[0674] Modifications in a complementarity domain can be selected to not interfere with targeting efficacy, which can be evaluated by testing a candidate modification in the system described in Section V. gRNA's having a candidate complementarity domain having a selected length, sequence, degree of complementarity, or degree of modification, can be evaluated in the system described in Section V. The candidate complementarity domain can be placed, either alone, or with one or more other candidate changes in a gRNA molecule/Cas9 molecule system known to be functional with a selected target and evaluated.

[0675] In an embodiment, the first complementarity domain has at least 60, 70, 80, 85%, 90% or 95% homology with, or differs by no more than 1, 2, 3, 4, 5, or 6 nucleotides from, a reference first complementarity domain, e.g., a naturally occurring, e.g., an S. pyogenes, S. aureus, or S. thermophilus, first complementarity domain, or a first complementarity domain described herein, e.g., from FIGS. 1A-1G.

[0676] In an embodiment, the second complementarity domain has at least 60, 70, 80, 85%, 90%, or 95% homology with, or differs by no more than 1, 2, 3, 4, 5, or 6 nucleotides from, a reference second complementarity domain, e.g., a naturally occurring, e.g., an S. pyogenes, S. aureus, or S. thermophilus, second complementarity domain, or a second complementarity domain described herein, e.g., from FIG. 1A-1G.

[0677] The duplexed region formed by first and second complementarity domains is typically 6, 7, 8, 9, 10, 11, 12, 13, 14, 15, 16, 17, 18, 19, 20, 21 or 22 base pairs in length (excluding any looped out or unpaired nucleotides).

[0678] In some embodiments, the first and second complementarity domains, when duplexed, comprise 11 paired nucleotides, for example, in the gRNA sequence (one paired strand underlined, one bolded):

(SEQ ID NO: 5)

NNNNNNNNNNNNNNNNNNNNGUUUUAGAGCUAGAAAUAGCAAGUUAAAA
UAAGGCUAGUCCGUUAUCAACUUGAAAAAGUGGCACCGAGUCGGUGC.

[0679] In some embodiments, the first and second complementarity domains, when duplexed, comprise 15 paired nucleotides, for example in the gRNA sequence (one paired strand underlined, one bolded):

(SEQ ID NO: 27)

NNNNNNNNNNNNNNNNNNNNGUUUUAGAGCUAUGCUGAAAAGCAUAGCA
AGUUAAAAUAAGGCUAGUCCGUUAUCAACUUGAAAAAGUGGCACCGAG
UCGGUGC.

[0680] In some embodiments the first and second complementarity domains, when duplexed, comprise 16 paired nucleotides, for example in the gRNA sequence (one paired strand underlined, one bolded):

(SEQ ID NO: 28)

NNNNNNNNNNNNNNNNNNNNGUUUUAGAGCUAUGCUGGAAACAGCAUAG
CAAGUUAAAAUAAGGCUAGUCCGUUAUCAACUUGAAAAAGUGGCACCGA
GUCGGUGC.

[0681] In some embodiments the first and second complementarity domains, when duplexed, comprise 21 paired nucleotides, for example in the gRNA sequence (one paired strand underlined, one bolded):

(SEQ ID NO: 29)

NNNNNNNNNNNNNNNNNNNNGUUUUAGAGCUAUGCUGUUUUGGAAACAAA
ACAGCAUAGCAAGUUAAAAUAAGGCUAGUCCGUUAUCAACUUGAAAAAGU
GGCACCGAGUCGGUGC.

[0682] In some embodiments, nucleotides are exchanged to remove poly-U tracts, for example in the gRNA sequences (exchanged nucleotides underlined):

(SEQ ID NO: 30)

NNNNNNNNNNNNNNNNNNNNGUAUUAGAGCUAGAAAUAGCAAGUUAAUAU
AAGGCUAGUCCGUUAUCAACUUGAAAAAGUGGCACCGAGUCGGUGC;

(SEQ ID NO: 31)

NNNNNNNNNNNNNNNNNNNNGUUUAAGAGCUAGAAAUAGCAAGUUUAAAU
AAGGCUAGUCCGUUAUCAACUUGAAAAAGUGGCACCGAGUCGGUGC;
and

(SEQ ID NO: 32)

NNNNNNNNNNNNNNNNNNNNGUAUUAGAGCUAUGCUGUAUUGGAAACAAU
ACAGCAUAGCAAGUUAAUAUAAGGCUAGUCCGUUAUCAACUUGAAAAAGU
GGCACCGAGUCGGUGC.

### 5′ Extension Domain

[0683] In an embodiment, a modular gRNA can comprise additional sequence, 5′ to the second complementarity domain. In an embodiment, the 5′ extension domain is 2 to 10, 2 to 9, 2 to 8, 2 to 7, 2 to 6, 2 to 5, or 2 to 4 nucleotides in length. In an embodiment, the 5′ extension domain is 2, 3, 4, 5, 6, 7, 8, 9, or 10 or more nucleotides in length.

[0684] In an embodiment, the 5′ extension domain nucleotides do not comprise modifications, e.g., modifications of the type provided in Section VIII. However, in an embodiment, the 5′ extension domain comprises one or more modifications, e.g., modifications that it render it less susceptible to degradation or more bio-compatible, e.g., less immunogenic. By way of example, the backbone of the 5′ extension domain can be modified with a phosphorothioate, or other modification(s) from Section VIII. In an embodiment, a nucleotide of the 5′ extension domain can comprise a 2′ modification, e.g., a 2-acetylation, e.g., a 2′ methylation, or other modification(s) from Section VIII.

[0685] In some embodiments, the 5′ extension domain can comprise as many as 1, 2, 3, 4, 5, 6, 7 or 8 modifications. In an embodiment, the 5′ extension domain comprises as many as 1, 2, 3, or 4 modifications within 5 nucleotides of its 5′ end, e.g., in a modular gRNA molecule. In an embodiment, the 5′ extension domain comprises as many as 1, 2, 3, or 4 modifications within 5 nucleotides of its 3′ end, e.g., in a modular gRNA molecule.

[0686] In some embodiments, the 5′ extension domain comprises modifications at two consecutive nucleotides, e.g., two consecutive nucleotides that are within 5 nucleotides of the 5′ end of the 5′ extension domain, within 5 nucleotides of the 3′ end of the 5′ extension domain, or more than 5 nucleotides away from one or both ends of the 5′ extension domain. In an embodiment, no two consecutive nucleotides are modified within 5 nucleotides of the 5′ end of the 5′ extension domain, within 5 nucleotides of the 3′ end of the 5′ extension domain, or within a region that is more than 5 nucleotides away from one or both ends of the 5′ extension domain. In an embodiment, no nucleotide is modified within 5 nucleotides of the 5′ end of the 5′ extension domain, within 5 nucleotides of the 3′ end of the 5′ extension domain, or within a region that is more than 5 nucleotides away from one or both ends of the 5′ extension domain.

[0687] Modifications in the 5′ extension domain can be selected to not interfere with gRNA molecule efficacy, which can be evaluated by testing a candidate modification in the system described in Section V. gRNA's having a candidate 5′ extension domain having a selected length, sequence, degree of complementarity, or degree of modification, can be evaluated in the system described at Section V. The candidate 5′ extension domain can be placed, either alone, or with one or more other candidate changes in a gRNA molecule/Cas9 molecule system known to be functional with a selected target and evaluated.

[0688] In an embodiment, the 5′ extension domain has at least 60, 70, 80, 85, 90 or 95% homology with, or differs by no more than 1, 2, 3, 4, 5, or 6 nucleotides from, a reference 5′ extension domain, e.g., a naturally occurring, e.g., an S. pyogenes, S. aureus, or S. thermophilus, 5′ extension domain, or a 5′ extension domain described herein, e.g., from FIGS. 1A-1G.

### Linking Domain

[0689] In a unimolecular gRNA molecule the linking domain is disposed between the first and second complementarity domains. In a modular gRNA molecule, the two molecules are associated with one another by the complementarity domains.

[0690] In an embodiment, the linking domain is 10+/−5, 20+/−5, 30+/−5, 40+/−5, 50+/−5, 60+/−5, 70+/−5, 80+/−5, 90+/−5, or 100+/−5 nucleotides, in length.

[0691] In an embodiment, the linking domain is 20+/−10, 30+/−10, 40+/−10, 50+/−10, 60+/−10, 70+/−10, 80+/−10, 90+/−10, or 100+/−10 nucleotides, in length.

[0692] In an embodiment, the linking domain is 10 to 100, 10 to 90, 10 to 80, 10 to 70, 10 to 60, 10 to 50, 10 to 40, 10 to 30, 10 to 20 or 10 to 15 nucleotides in length. In other embodiments, the linking domain is 20 to 100, 20 to 90, 20 to 80, 20 to 70, 20 to 60, 20 to 50, 20 to 40, 20 to 30, or 20 to 25 nucleotides in length.

[0693] In an embodiment, the linking domain is 1, 2, 3, 4, 5, 6, 7, 8, 9, 10, 11, 12, 13, 14, 15, 16 17, 18, 19, or 20 nucleotides in length.

[0694] In an embodiment, the linking domain is a covalent bond.

[0695] In an embodiment, the linking domain comprises a duplexed region, typically adjacent to or within 1, 2, or 3 nucleotides of the 3′ end of the first complementarity domain and/or the 5-end of the second complementarity domain. In an embodiment, the duplexed region can be 20+/−10 base pairs in length. In an embodiment, the duplexed region can be 10+/−5, 15+/−5, 20+/−5, or 30+/−5 base pairs in length. In an embodiment, the duplexed region can be 1, 2, 3, 4, 5, 6, 7, 8, 9, 10, 11, 12, 13, 14, or 15 base pairs in length.

[0696] Typically the sequences forming the duplexed region have exact complementarity with one another, though in some embodiments as many as 1, 2, 3, 4, 5, 6, 7 or 8 nucleotides are not complementary with the corresponding nucleotides.

[0697] In an embodiment, the linking domain nucleotides do not comprise modifications, e.g., modifications of the type provided in Section VIII. However, in an embodiment, the linking domain comprises one or more modifications, e.g., modifications that it render it less susceptible to degradation or more bio-compatible, e.g., less immunogenic. By way of example, the backbone of the linking domain can be modified with a phosphorothioate, or other modification(s) from Section VIII. In an embodiment a nucleotide of the linking domain can comprise a 2′ modification, e.g., a 2-acetylation, e.g., a 2′ methylation, or other modification(s) from Section VIII. In some embodiments, the linking domain can comprise as many as 1, 2, 3, 4, 5, 6, 7 or 8 modifications.

[0698] Modifications in a linking domain can be selected to not interfere with targeting efficacy, which can be evaluated by testing a candidate modification in the system described in Section V. gRNA's having a candidate linking domain having a selected length, sequence, degree of complementarity, or degree of modification, can be evaluated a system described in Section V. A candidate linking domain can be placed, either alone, or with one or more other candidate changes in a gRNA molecule/Cas9 molecule system known to be functional with a selected target and evaluated.

[0699] In an embodiment, the linking domain has at least 60, 70, 80, 85, 90 or 95% homology with, or differs by no more than 1, 2, 3, 4, 5, or 6 nucleotides from, a reference linking domain, e.g., a linking domain described herein, e.g., from FIGS. 1A-1G.

### Proximal Domain

[0700] In an embodiment, the proximal domain is 6+/−2, 7+/−2, 8+/−2, 9+/−2, 10+/−2, 11+/−2, 12+/−2, 13+/−2, 14+/−2, 14+/−2, 16+/−2, 17+/−2, 18+/−2, 19+/−2, or 20+/−2 nucleotides in length.

[0701] In an embodiment, the proximal domain is 6, 7, 8, 9, 10, 11, 12, 13, 14, 14, 16, 17, 18, 19, or 20 nucleotides in length.

[0702] In an embodiment, the proximal domain is 5 to 20, 7, to 18, 9 to 16, or 10 to 14 nucleotides in length.

[0703] In an embodiment, the proximal domain nucleotides do not comprise modifications, e.g., modifications of the type provided in Section VIII. However, in an embodiment, the proximal domain comprises one or more modifications, e.g., modifications that it render it less susceptible to degradation or more bio-compatible, e.g., less immunogenic. By way of example, the backbone of the proximal domain can be modified with a phosphorothioate, or other modification(s) from Section VIII. In an embodiment a nucleotide of the proximal domain can comprise a 2′ modification, e.g., a 2-acetylation, e.g., a 2′ methylation, or other modification(s) from Section VIII.

[0704] In some embodiments, the proximal domain can comprise as many as 1, 2, 3, 4, 5, 6, 7 or 8 modifications. In an embodiment, the proximal domain comprises as many as 1, 2, 3, or 4 modifications within 5 nucleotides of its 5′ end, e.g., in a modular gRNA molecule. In an embodiment, the target domain comprises as many as 1, 2, 3, or 4 modifications within 5 nucleotides of its 3′ end, e.g., in a modular gRNA molecule.

[0705] In some embodiments, the proximal domain comprises modifications at two consecutive nucleotides, e.g., two consecutive nucleotides that are within 5 nucleotides of the 5′ end of the proximal domain, within 5 nucleotides of the 3′ end of the proximal domain, or more than 5 nucleotides away from one or both ends of the proximal domain. In an embodiment, no two consecutive nucleotides are modified within 5 nucleotides of the 5′ end of the proximal domain, within 5 nucleotides of the 3′ end of the proximal domain, or within a region that is more than 5 nucleotides away from one or both ends of the proximal domain. In an embodiment, no nucleotide is modified within 5 nucleotides of the 5′ end of the proximal domain, within 5 nucleotides of the 3′ end of the proximal domain, or within a region that is more than 5 nucleotides away from one or both ends of the proximal domain.

[0706] Modifications in the proximal domain can be selected to not interfere with gRNA molecule efficacy, which can be evaluated by testing a candidate modification in the system described in Section V. gRNA's having a candidate proximal domain having a selected length, sequence, degree of complementarity, or degree of modification, can be evaluated in the system described at Section V. The candidate proximal domain can be placed, either alone, or with one or more other candidate changes in a gRNA molecule/Cas9 molecule system known to be functional with a selected target and evaluated.

[0707] In an embodiment, the proximal domain has at least 60, 70, 80, 85 90 or 95% homology with, or differs by no more than 1, 2, 3, 4, 5, or 6 nucleotides from, a reference proximal domain, e.g., a naturally occurring, e.g., an S. pyogenes, S. aureus, or S. thermophilus, proximal domain, or a proximal domain described herein, e.g., from FIGS. 1A-1G.

### Tail Domain

[0708] In an embodiment, the tail domain is 10+/−5, 20+/−5, 30+/−5, 40+/−5, 50+/−5, 60+/−5, 70+/−5, 80+/−5, 90+/−5, or 100+/−5 nucleotides, in length.

[0709] In an embodiment, the tail domain is 20+/−5 nucleotides in length.

[0710] In an embodiment, the tail domain is 20+/−10, 30+/−10, 40+/−10, 50+/−10, 60+/−10, 70+/−10, 80+/−10, 90+/−10, or 100+/−10 nucleotides, in length.

[0711] In an embodiment, the tail domain is 25+/−10 nucleotides in length.

[0712] In an embodiment, the tail domain is 10 to 100, 10 to 90, 10 to 80, 10 to 70, 10 to 60, 10 to 50, 10 to 40, 10 to 30, 10 to 20 or 10 to 15 nucleotides in length. In other embodiments, the tail domain is 20 to 100, 20 to 90, 20 to 80, 20 to 70, 20 to 60, 20 to 50, 20 to 40, 20 to 30, or 20 to 25 nucleotides in length.

[0713] In an embodiment, the tail domain is 1 to 20, 1 to 1, 1 to 10, or 1 to 5 nucleotides in length.

[0714] In an embodiment, the tail domain nucleotides do not comprise modifications, e.g., modifications of the type provided in Section VIII. However, in an embodiment, the tail domain comprises one or more modifications, e.g., modifications that it render it less susceptible to degradation or more bio-compatible, e.g., less immunogenic. By way of example, the backbone of the tail domain can be modified with a phosphorothioate, or other modification(s) from Section VIII. In an embodiment a nucleotide of the tail domain can comprise a 2′ modification, e.g., a 2-acetylation, e.g., a 2′ methylation, or other modification(s) from Section VIII.

[0715] In some embodiments, the tail domain can have as many as 1, 2, 3, 4, 5, 6, 7 or 8 modifications. In an embodiment, the target domain comprises as many as 1, 2, 3, or 4 modifications within 5 nucleotides of its 5′ end. In an embodiment, the target domain comprises as many as 1, 2, 3, or 4 modifications within 5 nucleotides of its 3′ end.

[0716] In an embodiment, the tail domain comprises a tail duplex domain, which can form a tail duplexed region. In an embodiment, the tail duplexed region can be 3, 4, 5, 6, 7, 8, 9, 10, 11, or 12 base pairs in length. In an embodiment, a further single stranded domain, exists 3′ to the tail duplexed domain. In an embodiment, this domain is 3, 4, 5, 6, 7, 8, 9, or 10 nucleotides in length. In an embodiment it is 4 to 6 nucleotides in length.

[0717] In an embodiment, the tail domain has at least 60, 70, 80, or 90% homology with, or differs by no more than 1, 2, 3, 4, 5, or 6 nucleotides from, a reference tail domain, e.g., a naturally occurring, e.g., an S. pyogenes, or S. thermophilus, tail domain, or a tail domain described herein, e.g., from FIGS. 1A-1G.

[0718] In an embodiment, the proximal and tail domain, taken together comprise the following sequences:

(SEQ ID NO: 33)

AAGGCUAGUCCGUUAUCAACUUGAAAAAGUGGCACCGAGUCGGUGCU,

(SEQ ID NO: 34)

AAGGCUAGUCCGUUAUCAACUUGAAAAAGUGGCACCGAGUCGGUGGUGC,

(SEQ ID NO: 35)

AAGGCUAGUCCGUUAUCAACUUGAAAAAGUGGCACCGAGUCGGUGCGGA
UC,

(SEQ ID NO: 36)

AAGGCUAGUCCGUUAUCAACUUGAAAAAGUG,

(SEQ ID NO: 37)

AAGGCUAGUCCGUUAUCA,
or

(SEQ ID NO: 38)

AAGGCUAGUCCG.

[0719] In an embodiment, the tail domain comprises the 3′ sequence UUUUUU, e.g., if a U6 promoter is used for transcription.

[0720] In an embodiment, the tail domain comprises the 3′ sequence UUUU, e.g., if an H1 promoter is used for transcription.

[0721] In an embodiment, tail domain comprises variable numbers of 3′ Us depending, e.g., on the termination signal of the pol-III promoter used.

[0722] In an embodiment, the tail domain comprises variable 3′ sequence derived from the DNA template if a T7 promoter is used.

[0723] In an embodiment, the tail domain comprises variable 3′ sequence derived from the DNA template, e.g., if in vitro transcription is used to generate the RNA molecule.

[0724] In an embodiment, the tail domain comprises variable 3′ sequence derived from the DNA template, e., if a pol-II promoter is used to drive transcription.

[0725] Modifications in the tail domain can be selected to not interfere with targeting efficacy, which can be evaluated by testing a candidate modification in the system described in Section V. gRNAs having a candidate tail domain having a selected length, sequence, degree of complementarity, or degree of modification, can be evaluated in the system described in Section V. The candidate tail domain can be placed, either alone, or with one or more other candidate changes in a gRNA molecule/Cas9 molecule system known to be functional with a selected target and evaluated.

[0726] In some embodiments, the tail domain comprises modifications at two consecutive nucleotides, e.g., two consecutive nucleotides that are within 5 nucleotides of the 5′ end of the tail domain, within 5 nucleotides of the 3′ end of the tail domain, or more than 5 nucleotides away from one or both ends of the tail domain. In an embodiment, no two consecutive nucleotides are modified within 5 nucleotides of the 5′ end of the tail domain, within 5 nucleotides of the 3′ end of the tail domain, or within a region that is more than 5 nucleotides away from one or both ends of the tail domain. In an embodiment, no nucleotide is modified within 5 nucleotides of the 5′ end of the tail domain, within 5 nucleotides of the 3′ end of the tail domain, or within a region that is more than 5 nucleotides away from one or both ends of the tail domain.

[0727] In an embodiment a gRNA has the following structure:

[0728] 5′ [targeting domain]-[first complementarity domain]-[linking domain]-[second complementarity domain]-[proximal domain]-[tail domain]-3′

[0729] wherein, the targeting domain comprises a core domain and optionally a secondary domain, and is 10 to 50 nucleotides in length;

[0730] the first complementarity domain is 5 to 25 nucleotides in length and, In an embodiment has at least 50, 60, 70, 80, 85, 90 or 95% homology with a reference first complementarity domain disclosed herein;

[0731] the linking domain is 1 to 5 nucleotides in length;

[0732] the proximal domain is 5 to 20 nucleotides in length and, in an embodiment has at least 50, 60, 70, 80, 85, 90 or 95% homology with a reference proximal domain disclosed herein; and

[0733] the tail domain is absent or a nucleotide sequence is 1 to 50 nucleotides in length and, in an embodiment has at least 50, 60, 70, 80, 85, 90 or 95% homology with a reference tail domain disclosed herein.

Exemplary Chimeric gRNAs

[0734] In an embodiment, a unimolecular, or chimeric, gRNA comprises, preferably from 5′ to 3′:

[0735] a targeting domain, e.g., comprising 15, 16, 17, 18, 19, 20, 21, 22, 23, 24, 25, or 26 nucleotides (which is complementary to a target nucleic acid);

[0736] a first complementarity domain;

[0737] a linking domain;

[0738] a second complementarity domain (which is complementary to the first complementarity domain);

[0739] a proximal domain; and

[0740] a tail domain,

[0741] wherein,

[0742] (a) the proximal and tail domain, when taken together, comprise at least 15, 18, 20, 25, 30, 31, 35, 40, 45, 49, 50, or 53 nucleotides;

[0743] (b) there are at least 15, 18, 20, 25, 30, 31, 35, 40, 45, 49, 50, or 53 nucleotides 3′ to the last nucleotide of the second complementarity domain; or

[0744] (c) there are at least 16, 19, 21, 26, 31, 32, 36, 41, 46, 50, 51, or 54 nucleotides 3′ to the last nucleotide of the second complementarity domain that is complementary to its corresponding nucleotide of the first complementarity domain.

[0745] In an embodiment, the sequence from (a), (b), or (c), has at least 60, 75, 80, 85, 90, 95, or 99% homology with the corresponding sequence of a naturally occurring gRNA, or with a gRNA described herein.

[0746] In an embodiment, the proximal and tail domain, when taken together, comprise at least 15, 18, 20, 25, 30, 31, 35, 40, 45, 49, 50, or 53 nucleotides.

[0747] In an embodiment, there are at least 15, 18, 20, 25, 30, 31, 35, 40, 45, 49, 50, or 53 nucleotides 3′ to the last nucleotide of the second complementarity domain.

[0748] In an embodiment, there are at least 16, 19, 21, 26, 31, 32, 36, 41, 46, 50, 51, or 54 nucleotides 3′ to the last nucleotide of the second complementarity domain that is complementary to its corresponding nucleotide of the first complementarity domain.

[0749] In an embodiment, the targeting domain comprises, has, or consists of, 16, 17, 18, 19, 20, 21, 22, 23, 24, 25 or 26 nucleotides (e.g., 16, 17, 18, 19, 20, 21, 22, 23, 24, 25 or 26 consecutive nucleotides) having complementarity with the target domain, e.g., the targeting domain is 16, 17, 18, 19, 20, 21, 22, 23, 24, 25 or 26 nucleotides in length.

[0750] In an embodiment, the targeting domain comprises, has, or consists of, 16 nucleotides (e.g., 16 consecutive nucleotides) having complementarity with the target domain, e.g., the targeting domain is 16 nucleotides in length.

[0751] In an embodiment, the targeting domain comprises, has, or consists of, 17 nucleotides (e.g., 17 consecutive nucleotides) having complementarity with the target domain, e.g., the targeting domain is 17 nucleotides in length.

[0752] In an embodiment, the targeting domain comprises, has, or consists of, 18 nucleotides (e.g., 18 consecutive nucleotides) having complementarity with the target domain, e.g., the targeting domain is 18 nucleotides in length.

[0753] In an embodiment, the targeting domain comprises, has, or consists of, 19 nucleotides (e.g., 19 consecutive nucleotides) having complementarity with the target domain, e.g., the targeting domain is 19 nucleotides in length.

[0754] In an embodiment, the targeting domain comprises, has, or consists of, 20 nucleotides (e.g., 20 consecutive nucleotides) having complementarity with the target domain, e.g., the targeting domain is 20 nucleotides in length.

[0755] In an embodiment, the targeting domain comprises, has, or consists of, 21 nucleotides (e.g., 21 consecutive nucleotides) having complementarity with the target domain, e.g., the targeting domain is 21 nucleotides in length.

[0756] In an embodiment, the targeting domain comprises, has, or consists of, 22 nucleotides (e.g., 22 consecutive nucleotides) having complementarity with the target domain, e.g., the targeting domain is 22 nucleotides in length.

[0757] In an embodiment, the targeting domain comprises, has, or consists of, 23 nucleotides (e.g., 23 consecutive nucleotides) having complementarity with the target domain, e.g., the targeting domain is 23 nucleotides in length.

[0758] In an embodiment, the targeting domain comprises, has, or consists of, 24 nucleotides (e.g., 24 consecutive nucleotides) having complementarity with the target domain, e.g., the targeting domain is 24 nucleotides in length.

[0759] In an embodiment, the targeting domain comprises, has, or consists of, 25 nucleotides (e.g., 25 consecutive nucleotides) having complementarity with the target domain, e.g., the targeting domain is 25 nucleotides in length.

[0760] In an embodiment, the targeting domain comprises, has, or consists of, 26 nucleotides (e.g., 26 consecutive nucleotides) having complementarity with the target domain, e.g., the targeting domain is 26 nucleotides in length.

[0761] In an embodiment, the targeting domain comprises, has, or consists of, 16 nucleotides (e.g., 16 consecutive nucleotides) having complementarity with the target domain, e.g., the targeting domain is 16 nucleotides in length; and the proximal and tail domain, when taken together, comprise at least 15, 18, 20, 25, 30, 31, 35, 40, 45, 49, 50, or 53 nucleotides.

[0762] In an embodiment, the targeting domain comprises, has, or consists of, 16 nucleotides (e.g., 16 consecutive nucleotides) having complementarity with the target domain, e.g., the targeting domain is 16 nucleotides in length; and there are at least 15, 18, 20, 25, 30, 31, 35, 40, 45, 49, 50, or 53 nucleotides 3′ to the last nucleotide of the second complementarity domain.

[0763] In an embodiment, the targeting domain comprises, has, or consists of, 16 nucleotides (e.g., 16 consecutive nucleotides) having complementarity with the target domain, e.g., the targeting domain is 16 nucleotides in length; and there are at least 16, 19, 21, 26, 31, 32, 36, 41, 46, 50, 51, or 54 nucleotides 3′ to the last nucleotide of the second complementarity domain that is complementary to its corresponding nucleotide of the first complementarity domain.

[0764] In an embodiment, the targeting domain comprises, has, or consists of, 17 nucleotides (e.g., 17 consecutive nucleotides) having complementarity with the target domain, e.g., the targeting domain is 17 nucleotides in length; and the proximal and tail domain, when taken together, comprise at least 15, 18, 20, 25, 30, 31, 35, 40, 45, 49, 50, or 53 nucleotides.

[0765] In an embodiment, the targeting domain comprises, has, or consists of, 17 nucleotides (e.g., 17 consecutive nucleotides) having complementarity with the target domain, e.g., the targeting domain is 17 nucleotides in length; and there are at least 15, 18, 20, 25, 30, 31, 35, 40, 45, 49, 50, or 53 nucleotides 3′ to the last nucleotide of the second complementarity domain.

[0766] In an embodiment, the targeting domain comprises, has, or consists of, 17 nucleotides (e.g., 17 consecutive nucleotides) having complementarity with the target domain, e.g., the targeting domain is 17 nucleotides in length; and there are at least 16, 19, 21, 26, 31, 32, 36, 41, 46, 50, 51, or 54 nucleotides 3′ to the last nucleotide of the second complementarity domain that is complementary to its corresponding nucleotide of the first complementarity domain.

[0767] In an embodiment, the targeting domain comprises, has, or consists of, 18 nucleotides (e.g., 18 consecutive nucleotides) having complementarity with the target domain, e.g., the targeting domain is 18 nucleotides in length; and the proximal and tail domain, when taken together, comprise at least 15, 18, 20, 25, 30, 31, 35, 40, 45, 49, 50, or 53 nucleotides.

[0768] In an embodiment, the targeting domain comprises, has, or consists of, 18 nucleotides (e.g., 18 consecutive nucleotides) having complementarity with the target domain, e.g., the targeting domain is 18 nucleotides in length; and there are at least 15, 18, 20, 25, 30, 31, 35, 40, 45, 49, 50, or 53 nucleotides 3′ to the last nucleotide of the second complementarity domain.

[0769] In an embodiment, the targeting domain comprises, has, or consists of, 18 nucleotides (e.g., 18 consecutive nucleotides) having complementarity with the target domain, e.g., the targeting domain is 18 nucleotides in length; and there are at least 16, 19, 21, 26, 31, 32, 36, 41, 46, 50, 51, or 54 nucleotides 3′ to the last nucleotide of the second complementarity domain that is complementary to its corresponding nucleotide of the first complementarity domain.

[0770] In an embodiment, the targeting domain comprises, has, or consists of, 19 nucleotides (e.g., 19 consecutive nucleotides) having complementarity with the target domain, e.g., the targeting domain is 19 nucleotides in length; and the proximal and tail domain, when taken together, comprise at least 15, 18, 20, 25, 30, 31, 35, 40, 45, 49, 50, or 53 nucleotides.

[0771] In an embodiment, the targeting domain comprises, has, or consists of, 19 nucleotides (e.g., 19 consecutive nucleotides) having complementarity with the target domain, e.g., the targeting domain is 19 nucleotides in length; and there are at least 15, 18, 20, 25, 30, 31, 35, 40, 45, 49, 50, or 53 nucleotides 3′ to the last nucleotide of the second complementarity domain.

[0772] In an embodiment, the targeting domain comprises, has, or consists of, 19 nucleotides (e.g., 19 consecutive nucleotides) having complementarity with the target domain, e.g., the targeting domain is 19 nucleotides in length; and there are at least 16, 19, 21, 26, 31, 32, 36, 41, 46, 50, 51, or 54 nucleotides 3′ to the last nucleotide of the second complementarity domain that is complementary to its corresponding nucleotide of the first complementarity domain.

[0773] In an embodiment, the targeting domain comprises, has, or consists of, 20 nucleotides (e.g., 20 consecutive nucleotides) having complementarity with the target domain, e.g., the targeting domain is 20 nucleotides in length; and the proximal and tail domain, when taken together, comprise at least 15, 18, 20, 25, 30, 31, 35, 40, 45, 49, 50, or 53 nucleotides.

[0774] In an embodiment, the targeting domain comprises, has, or consists of, 20 nucleotides (e.g., 20 consecutive nucleotides) having complementarity with the target domain, e.g., the targeting domain is 20 nucleotides in length; and there are at least 15, 18, 20, 25, 30, 31, 35, 40, 45, 49, 50, or 53 nucleotides 3′ to the last nucleotide of the second complementarity domain.

[0775] In an embodiment, the targeting domain comprises, has, or consists of, 20 nucleotides (e.g., 20 consecutive nucleotides) having complementarity with the target domain, e.g., the targeting domain is 20 nucleotides in length; and there are at least 16, 19, 21, 26, 31, 32, 36, 41, 46, 50, 51, or 54 nucleotides 3′ to the last nucleotide of the second complementarity domain that is complementary to its corresponding nucleotide of the first complementarity domain.

[0776] In an embodiment, the targeting domain comprises, has, or consists of, 21 nucleotides (e.g., 21 consecutive nucleotides) having complementarity with the target domain, e.g., the targeting domain is 21 nucleotides in length; and the proximal and tail domain, when taken together, comprise at least 15, 18, 20, 25, 30, 31, 35, 40, 45, 49, 50, or 53 nucleotides.

[0777] In an embodiment, the targeting domain comprises, has, or consists of, 21 nucleotides (e.g., 21 consecutive nucleotides) having complementarity with the target domain, e.g., the targeting domain is 21 nucleotides in length; and there are at least 15, 18, 20, 25, 30, 31, 35, 40, 45, 49, 50, or 53 nucleotides 3′ to the last nucleotide of the second complementarity domain.

[0778] In an embodiment, the targeting domain comprises, has, or consists of, 21 nucleotides (e.g., 21 consecutive nucleotides) having complementarity with the target domain, e.g., the targeting domain is 21 nucleotides in length; and there are at least 16, 19, 21, 26, 31, 32, 36, 41, 46, 50, 51, or 54 nucleotides 3′ to the last nucleotide of the second complementarity domain that is complementary to its corresponding nucleotide of the first complementarity domain.

[0779] In an embodiment, the targeting domain comprises, has, or consists of, 22 nucleotides (e.g., 22 consecutive nucleotides) having complementarity with the target domain, e.g., the targeting domain is 22 nucleotides in length; and the proximal and tail domain, when taken together, comprise at least 15, 18, 20, 25, 30, 31, 35, 40, 45, 49, 50, or 53 nucleotides.

[0780] In an embodiment, the targeting domain comprises, has, or consists of, 22 nucleotides (e.g., 22 consecutive nucleotides) having complementarity with the target domain, e.g., the targeting domain is 22 nucleotides in length; and there are at least 15, 18, 20, 25, 30, 31, 35, 40, 45, 49, 50, or 53 nucleotides 3′ to the last nucleotide of the second complementarity domain.

[0781] In an embodiment, the targeting domain comprises, has, or consists of, 22 nucleotides (e.g., 22 consecutive nucleotides) having complementarity with the target domain, e.g., the targeting domain is 22 nucleotides in length; and there are at least 16, 19, 21, 26, 31, 32, 36, 41, 46, 50, 51, or 54 nucleotides 3′ to the last nucleotide of the second complementarity domain that is complementary to its corresponding nucleotide of the first complementarity domain.

[0782] In an embodiment, the targeting domain comprises, has, or consists of, 23 nucleotides (e.g., 23 consecutive nucleotides) having complementarity with the target domain, e.g., the targeting domain is 23 nucleotides in length; and the proximal and tail domain, when taken together, comprise at least 15, 18, 20, 25, 30, 31, 35, 40, 45, 49, 50, or 53 nucleotides.

[0783] In an embodiment, the targeting domain comprises, has, or consists of, 23 nucleotides (e.g., 23 consecutive nucleotides) having complementarity with the target domain, e.g., the targeting domain is 23 nucleotides in length; and there are at least 15, 18, 20, 25, 30, 31, 35, 40, 45, 49, 50, or 53 nucleotides 3′ to the last nucleotide of the second complementarity domain.

[0784] In an embodiment, the targeting domain comprises, has, or consists of, 23 nucleotides (e.g., 23 consecutive nucleotides) having complementarity with the target domain, e.g., the targeting domain is 23 nucleotides in length; and there are at least 16, 19, 21, 26, 31, 32, 36, 41, 46, 50, 51, or 54 nucleotides 3′ to the last nucleotide of the second complementarity domain that is complementary to its corresponding nucleotide of the first complementarity domain.

[0785] In an embodiment, the targeting domain comprises, has, or consists of, 24 nucleotides (e.g., 24 consecutive nucleotides) having complementarity with the target domain, e.g., the targeting domain is 24 nucleotides in length; and the proximal and tail domain, when taken together, comprise at least 15, 18, 20, 25, 30, 31, 35, 40, 45, 49, 50, or 53 nucleotides.

[0786] In an embodiment, the targeting domain comprises, has, or consists of, 24 nucleotides (e.g., 24 consecutive nucleotides) having complementarity with the target domain, e.g., the targeting domain is 24 nucleotides in length; and there are at least 15, 18, 20, 25, 30, 31, 35, 40, 45, 49, 50, or 53 nucleotides 3′ to the last nucleotide of the second complementarity domain.

[0787] In an embodiment, the targeting domain comprises, has, or consists of, 24 nucleotides (e.g., 24 consecutive nucleotides) having complementarity with the target domain, e.g., the targeting domain is 24 nucleotides in length; and there are at least 16, 19, 21, 26, 31, 32, 36, 41, 46, 50, 51, or 54 nucleotides 3′ to the last nucleotide of the second complementarity domain that is complementary to its corresponding nucleotide of the first complementarity domain.

[0788] In an embodiment, the targeting domain comprises, has, or consists of, 25 nucleotides (e.g., 25 consecutive nucleotides) having complementarity with the target domain, e.g., the targeting domain is 25 nucleotides in length; and the proximal and tail domain, when taken together, comprise at least 15, 18, 20, 25, 30, 31, 35, 40, 45, 49, 50, or 53 nucleotides.

[0789] In an embodiment, the targeting domain comprises, has, or consists of, 25 nucleotides (e.g., 25 consecutive nucleotides) having complementarity with the target domain, e.g., the targeting domain is 25 nucleotides in length; and there are at least 15, 18, 20, 25, 30, 31, 35, 40, 45, 49, 50, or 53 nucleotides 3′ to the last nucleotide of the second complementarity domain.

[0790] In an embodiment, the targeting domain comprises, has, or consists of, 25 nucleotides (e.g., 25 consecutive nucleotides) having complementarity with the target domain, e.g., the targeting domain is 25 nucleotides in length; and there are at least 16, 19, 21, 26, 31, 32, 36, 41, 46, 50, 51, or 54 nucleotides 3′ to the last nucleotide of the second complementarity domain that is complementary to its corresponding nucleotide of the first complementarity domain.

[0791] In an embodiment, the targeting domain comprises, has, or consists of, 26 nucleotides (e.g., 26 consecutive nucleotides) having complementarity with the target domain, e.g., the targeting domain is 26 nucleotides in length; and the proximal and tail domain, when taken together, comprise at least 15, 18, 20, 25, 30, 31, 35, 40, 45, 49, 50, or 53 nucleotides.

[0792] In an embodiment, the targeting domain comprises, has, or consists of, 26 nucleotides (e.g., 26 consecutive nucleotides) having complementarity with the target domain, e.g., the targeting domain is 26 nucleotides in length; and there are at least 15, 18, 20, 25, 30, 31, 35, 40, 45, 49, 50, or 53 nucleotides 3′ to the last nucleotide of the second complementarity domain.

[0793] In an embodiment, the targeting domain comprises, has, or consists of, 26 nucleotides (e.g., 26 consecutive nucleotides) having complementarity with the target domain, e.g., the targeting domain is 26 nucleotides in length; and there are at least 16, 19, 21, 26, 31, 32, 36, 41, 46, 50, 51, or 54 nucleotides 3′ to the last nucleotide of the second complementarity domain that is complementary to its corresponding nucleotide of the first complementarity domain.

[0794] In an embodiment, the unimolecular, or chimeric, gRNA molecule (comprising a targeting domain, a first complementary domain, a linking domain, a second complementary domain, a proximal domain and, optionally, a tail domain) comprises the following sequence in which the targeting domain is depicted as 20 Ns but could be any sequence and range in length from 16 to 26 nucleotides and in which the gRNA sequence is followed by 6 Us, which serve as a termination signal for the U6 promoter, but which could be either absent or fewer in number:

(SEQ ID NO: 45)

NNNNNNNNNNNNNNNNNNNNGUUUUAGAGCUAGAAAUAGCAAGUUAAAAU
AAGGCUAGUCCGUUAUCAACUUGAAAAAGUGGCACCGAGUCGGUGCUU
UUUU.

In an embodiment, the unimolecular, or chimeric, gRNA molecule is a S. pyogenes gRNA molecule.

[0795] In some embodiments, the unimolecular, or chimeric, gRNA molecule (comprising a targeting domain, a first complementary domain, a linking domain, a second complementary domain, a proximal domain and, optionally, a tail domain) comprises the following sequence in which the targeting domain is depicted as 20 Ns but could be any sequence and range in length from 16 to 26 nucleotides and in which the gRNA sequence is followed by 6 Us, which serve as a termination signal for the U6 promoter, but which could be either absent or fewer in number:

(SEQ ID NO: 2779)

NNNNNNNNNNNNNNNNNNNNGUUUUAGUACUCUGGAAACAGAAUCUACUA
AAACAAGGCAAAAUGCCGUGUUUAUCUCGUCAACUUGUUGGCGAGAUU
UUUU

(corresponding DNA sequence in SEQ ID NO: 2785). In an embodiment, the unimolecular, or chimeric, gRNA molecule is a S. aureus gRNA molecule.

[0796] The sequences and structures of exemplary chimeric gRNAs of SEQ ID NOs: 45 and 2779 are shown in FIGS. 18A-18B, respectively.

Exemplary Modular gRNAs

[0797] In an embodiment, a modular gRNA comprises:

[0798] a first strand comprising, preferably from 5′ to 3′:

[0799] a targeting domain, e.g., comprising 15, 16, 17, 18, 19, 20, 21, 22, 23, 24, 25, or 26 nucleotides;

[0800] a first complementarity domain; and

[0801] a second strand, comprising, preferably from 5′ to 3′:

[0802] optionally a 5′ extension domain;

[0803] a second complementarity domain;

[0804] a proximal domain; and

[0805] a tail domain,

[0806] wherein:

[0807] (a) the proximal and tail domain, when taken together, comprise at least 15, 18, 20, 25, 30, 31, 35, 40, 45, 49, 50, or 53 nucleotides;

[0808] (b) there are at least 15, 18, 20, 25, 30, 31, 35, 40, 45, 49, 50, or 53 nucleotides 3′ to the last nucleotide of the second complementarity domain; or

[0809] (c) there are at least 16, 19, 21, 26, 31, 32, 36, 41, 46, 50, 51, or 54 nucleotides 3′ to the last nucleotide of the second complementarity domain that is complementary to its corresponding nucleotide of the first complementarity domain.

[0810] In an embodiment, the sequence from (a), (b), or (c), has at least 60, 75, 80, 85, 90, 95, or 99% homology with the corresponding sequence of a naturally occurring gRNA, or with a gRNA described herein.

[0811] In an embodiment, the proximal and tail domain, when taken together, comprise at least 15, 18, 20, 25, 30, 31, 35, 40, 45, 49, 50, or 53 nucleotides.

[0812] In an embodiment, there are at least 15, 18, 20, 25, 30, 31, 35, 40, 45, 49, 50, or 53 nucleotides 3′ to the last nucleotide of the second complementarity domain.

[0813] In an embodiment, there are at least 16, 19, 21, 26, 31, 32, 36, 41, 46, 50, 51, or 54 nucleotides 3′ to the last nucleotide of the second complementarity domain that is complementary to its corresponding nucleotide of the first complementarity domain.

[0814] In an embodiment, the targeting domain comprises, has, or consists of, 16, 17, 18, 19, 20, 21, 22, 23, 24, 25 or 26 nucleotides (e.g., 16, 17, 18, 19, 20, 21, 22, 23, 24, 25 or 26 consecutive nucleotides) having complementarity with the target domain, e.g., the targeting domain is 16, 17, 18, 19, 20, 21, 22, 23, 24, 25 or 26 nucleotides in length.

[0815] In an embodiment, the targeting domain comprises, has, or consists of, 16 nucleotides (e.g., 16 consecutive nucleotides) having complementarity with the target domain, e.g., the targeting domain is 16 nucleotides in length.

[0816] In an embodiment, the targeting domain comprises, has, or consists of, 17 nucleotides (e.g., 17 consecutive nucleotides) having complementarity with the target domain, e.g., the targeting domain is 17 nucleotides in length.

[0817] In an embodiment, the targeting domain comprises, has, or consists of, 18 nucleotides (e.g., 18 consecutive nucleotides) having complementarity with the target domain, e.g., the targeting domain is 18 nucleotides in length.

[0818] In an embodiment, the targeting domain comprises, has, or consists of, 19 nucleotides (e.g., 19 consecutive nucleotides) having complementarity with the target domain, e.g., the targeting domain is 19 nucleotides in length.

[0819] In an embodiment, the targeting domain comprises, has, or consists of, 20 nucleotides (e.g., 20 consecutive nucleotides) having complementarity with the target domain, e.g., the targeting domain is 20 nucleotides in length.

[0820] In an embodiment, the targeting domain comprises, has, or consists of, 21 nucleotides (e.g., 21 consecutive nucleotides) having complementarity with the target domain, e.g., the targeting domain is 21 nucleotides in length.

[0821] In an embodiment, the targeting domain comprises, has, or consists of, 22 nucleotides (e.g., 22 consecutive nucleotides) having complementarity with the target domain, e.g., the targeting domain is 22 nucleotides in length.

[0822] In an embodiment, the targeting domain comprises, has, or consists of, 23 nucleotides (e.g., 23 consecutive nucleotides) having complementarity with the target domain, e.g., the targeting domain is 23 nucleotides in length.

[0823] In an embodiment, the targeting domain comprises, has, or consists of, 24 nucleotides (e.g., 24 consecutive nucleotides) having complementarity with the target domain, e.g., the targeting domain is 24 nucleotides in length.

[0824] In an embodiment, the targeting domain comprises, has, or consists of, 25 nucleotides (e.g., 25 consecutive nucleotides) having complementarity with the target domain, e.g., the targeting domain is 25 nucleotides in length.

[0825] In an embodiment, the targeting domain comprises, has, or consists of, 26 nucleotides (e.g., 26 consecutive nucleotides) having complementarity with the target domain, e.g., the targeting domain is 26 nucleotides in length.

[0826] In an embodiment, the targeting domain comprises, has, or consists of, 16 nucleotides (e.g., 16 consecutive nucleotides) having complementarity with the target domain, e.g., the targeting domain is 16 nucleotides in length; and the proximal and tail domain, when taken together, comprise at least 15, 18, 20, 25, 30, 31, 35, 40, 45, 49, 50, or 53 nucleotides.

[0827] In an embodiment, the targeting domain comprises, has, or consists of, 16 nucleotides (e.g., 16 consecutive nucleotides) having complementarity with the target domain, e.g., the targeting domain is 16 nucleotides in length; and there are at least 15, 18, 20, 25, 30, 31, 35, 40, 45, 49, 50, or 53 nucleotides 3′ to the last nucleotide of the second complementarity domain.

[0828] In an embodiment, the targeting domain comprises, has, or consists of, 16 nucleotides (e.g., 16 consecutive nucleotides) having complementarity with the target domain, e.g., the targeting domain is 16 nucleotides in length; and there are at least 16, 19, 21, 26, 31, 32, 36, 41, 46, 50, 51, or 54 nucleotides 3′ to the last nucleotide of the second complementarity domain that is complementary to its corresponding nucleotide of the first complementarity domain.

[0829] In an embodiment, the targeting domain comprises, has, or consists of, 17 nucleotides (e.g., 17 consecutive nucleotides) having complementarity with the target domain, e.g., the targeting domain is 17 nucleotides in length; and the proximal and tail domain, when taken together, comprise at least 15, 18, 20, 25, 30, 31, 35, 40, 45, 49, 50, or 53 nucleotides.

[0830] In an embodiment, the targeting domain comprises, has, or consists of, 17 nucleotides (e.g., 17 consecutive nucleotides) having complementarity with the target domain, e.g., the targeting domain is 17 nucleotides in length; and there are at least 15, 18, 20, 25, 30, 31, 35, 40, 45, 49, 50, or 53 nucleotides 3′ to the last nucleotide of the second complementarity domain.

[0831] In an embodiment, the targeting domain comprises, has, or consists of, 17 nucleotides (e.g., 17 consecutive nucleotides) having complementarity with the target domain, e.g., the targeting domain is 17 nucleotides in length; and there are at least 16, 19, 21, 26, 31, 32, 36, 41, 46, 50, 51, or 54 nucleotides 3′ to the last nucleotide of the second complementarity domain that is complementary to its corresponding nucleotide of the first complementarity domain.

[0832] In an embodiment, the targeting domain comprises, has, or consists of, 18 nucleotides (e.g., 18 consecutive nucleotides) having complementarity with the target domain, e.g., the targeting domain is 18 nucleotides in length; and the proximal and tail domain, when taken together, comprise at least 15, 18, 20, 25, 30, 31, 35, 40, 45, 49, 50, or 53 nucleotides.

[0833] In an embodiment, the targeting domain comprises, has, or consists of, 18 nucleotides (e.g., 18 consecutive nucleotides) having complementarity with the target domain, e.g., the targeting domain is 18 nucleotides in length; and there are at least 15, 18, 20, 25, 30, 31, 35, 40, 45, 49, 50, or 53 nucleotides 3′ to the last nucleotide of the second complementarity domain.

[0834] In an embodiment, the targeting domain comprises, has, or consists of, 18 nucleotides (e.g., 18 consecutive nucleotides) having complementarity with the target domain, e.g., the targeting domain is 18 nucleotides in length; and there are at least 16, 19, 21, 26, 31, 32, 36, 41, 46, 50, 51, or 54 nucleotides 3′ to the last nucleotide of the second complementarity domain that is complementary to its corresponding nucleotide of the first complementarity domain.

[0835] In an embodiment, the targeting domain comprises, has, or consists of, 19 nucleotides (e.g., 19 consecutive nucleotides) having complementarity with the target domain, e.g., the targeting domain is 19 nucleotides in length; and the proximal and tail domain, when taken together, comprise at least 15, 18, 20, 25, 30, 31, 35, 40, 45, 49, 50, or 53 nucleotides.

[0836] In an embodiment, the targeting domain comprises, has, or consists of, 19 nucleotides (e.g., 19 consecutive nucleotides) having complementarity with the target domain, e.g., the targeting domain is 19 nucleotides in length; and there are at least 15, 18, 20, 25, 30, 31, 35, 40, 45, 49, 50, or 53 nucleotides 3′ to the last nucleotide of the second complementarity domain.

[0837] In an embodiment, the targeting domain comprises, has, or consists of, 19 nucleotides (e.g., 19 consecutive nucleotides) having complementarity with the target domain, e.g., the targeting domain is 19 nucleotides in length; and there are at least 16, 19, 21, 26, 31, 32, 36, 41, 46, 50, 51, or 54 nucleotides 3′ to the last nucleotide of the second complementarity domain that is complementary to its corresponding nucleotide of the first complementarity domain.

[0838] In an embodiment, the targeting domain comprises, has, or consists of, 20 nucleotides (e.g., 20 consecutive nucleotides) having complementarity with the target domain, e.g., the targeting domain is 20 nucleotides in length; and the proximal and tail domain, when taken together, comprise at least 15, 18, 20, 25, 30, 31, 35, 40, 45, 49, 50, or 53 nucleotides.

[0839] In an embodiment, the targeting domain comprises, has, or consists of, 20 nucleotides (e.g., 20 consecutive nucleotides) having complementarity with the target domain, e.g., the targeting domain is 20 nucleotides in length; and there are at least 15, 18, 20, 25, 30, 31, 35, 40, 45, 49, 50, or 53 nucleotides 3′ to the last nucleotide of the second complementarity domain.

[0840] In an embodiment, the targeting domain comprises, has, or consists of, 20 nucleotides (e.g., 20 consecutive nucleotides) having complementarity with the target domain, e.g., the targeting domain is 20 nucleotides in length; and there are at least 16, 19, 21, 26, 31, 32, 36, 41, 46, 50, 51, or 54 nucleotides 3′ to the last nucleotide of the second complementarity domain that is complementary to its corresponding nucleotide of the first complementarity domain.

[0841] In an embodiment, the targeting domain comprises, has, or consists of, 21 nucleotides (e.g., 21 consecutive nucleotides) having complementarity with the target domain, e.g., the targeting domain is 21 nucleotides in length; and the proximal and tail domain, when taken together, comprise at least 15, 18, 20, 25, 30, 31, 35, 40, 45, 49, 50, or 53 nucleotides.

[0842] In an embodiment, the targeting domain comprises, has, or consists of, 21 nucleotides (e.g., 21 consecutive nucleotides) having complementarity with the target domain, e.g., the targeting domain is 21 nucleotides in length; and there are at least 15, 18, 20, 25, 30, 31, 35, 40, 45, 49, 50, or 53 nucleotides 3′ to the last nucleotide of the second complementarity domain.

[0843] In an embodiment, the targeting domain comprises, has, or consists of, 21 nucleotides (e.g., 21 consecutive nucleotides) having complementarity with the target domain, e.g., the targeting domain is 21 nucleotides in length; and there are at least 16, 19, 21, 26, 31, 32, 36, 41, 46, 50, 51, or 54 nucleotides 3′ to the last nucleotide of the second complementarity domain that is complementary to its corresponding nucleotide of the first complementarity domain.

[0844] In an embodiment, the targeting domain comprises, has, or consists of, 22 nucleotides (e.g., 22 consecutive nucleotides) having complementarity with the target domain, e.g., the targeting domain is 22 nucleotides in length; and the proximal and tail domain, when taken together, comprise at least 15, 18, 20, 25, 30, 31, 35, 40, 45, 49, 50, or 53 nucleotides.

[0845] In an embodiment, the targeting domain comprises, has, or consists of, 22 nucleotides (e.g., 22 consecutive nucleotides) having complementarity with the target domain, e.g., the targeting domain is 22 nucleotides in length; and there are at least 15, 18, 20, 25, 30, 31, 35, 40, 45, 49, 50, or 53 nucleotides 3′ to the last nucleotide of the second complementarity domain.

[0846] In an embodiment, the targeting domain comprises, has, or consists of, 22 nucleotides (e.g., 22 consecutive nucleotides) having complementarity with the target domain, e.g., the targeting domain is 22 nucleotides in length; and there are at least 16, 19, 21, 26, 31, 32, 36, 41, 46, 50, 51, or 54 nucleotides 3′ to the last nucleotide of the second complementarity domain that is complementary to its corresponding nucleotide of the first complementarity domain.

[0847] In an embodiment, the targeting domain comprises, has, or consists of, 23 nucleotides (e.g., 23 consecutive nucleotides) having complementarity with the target domain, e.g., the targeting domain is 23 nucleotides in length; and the proximal and tail domain, when taken together, comprise at least 15, 18, 20, 25, 30, 31, 35, 40, 45, 49, 50, or 53 nucleotides.

[0848] In an embodiment, the targeting domain comprises, has, or consists of, 23 nucleotides (e.g., 23 consecutive nucleotides) having complementarity with the target domain, e.g., the targeting domain is 23 nucleotides in length; and there are at least 15, 18, 20, 25, 30, 31, 35, 40, 45, 49, 50, or 53 nucleotides 3′ to the last nucleotide of the second complementarity domain.

[0849] In an embodiment, the targeting domain comprises, has, or consists of, 23 nucleotides (e.g., 23 consecutive nucleotides) having complementarity with the target domain, e.g., the targeting domain is 23 nucleotides in length; and there are at least 16, 19, 21, 26, 31, 32, 36, 41, 46, 50, 51, or 54 nucleotides 3′ to the last nucleotide of the second complementarity domain that is complementary to its corresponding nucleotide of the first complementarity domain.

[0850] In an embodiment, the targeting domain comprises, has, or consists of, 24 nucleotides (e.g., 24 consecutive nucleotides) having complementarity with the target domain, e.g., the targeting domain is 24 nucleotides in length; and the proximal and tail domain, when taken together, comprise at least 15, 18, 20, 25, 30, 31, 35, 40, 45, 49, 50, or 53 nucleotides.

[0851] In an embodiment, the targeting domain comprises, has, or consists of, 24 nucleotides (e.g., 24 consecutive nucleotides) having complementarity with the target domain, e.g., the targeting domain is 24 nucleotides in length; and there are at least 15, 18, 20, 25, 30, 31, 35, 40, 45, 49, 50, or 53 nucleotides 3′ to the last nucleotide of the second complementarity domain.

[0852] In an embodiment, the targeting domain comprises, has, or consists of, 24 nucleotides (e.g., 24 consecutive nucleotides) having complementarity with the target domain, e.g., the targeting domain is 24 nucleotides in length; and there are at least 16, 19, 21, 26, 31, 32, 36, 41, 46, 50, 51, or 54 nucleotides 3′ to the last nucleotide of the second complementarity domain that is complementary to its corresponding nucleotide of the first complementarity domain.

[0853] In an embodiment, the targeting domain comprises, has, or consists of, 25 nucleotides (e.g., 25 consecutive nucleotides) having complementarity with the target domain, e.g., the targeting domain is 25 nucleotides in length; and the proximal and tail domain, when taken together, comprise at least 15, 18, 20, 25, 30, 31, 35, 40, 45, 49, 50, or 53 nucleotides.

[0854] In an embodiment, the targeting domain comprises, has, or consists of, 25 nucleotides (e.g., 25 consecutive nucleotides) having complementarity with the target domain, e.g., the targeting domain is 25 nucleotides in length; and there are at least 15, 18, 20, 25, 30, 31, 35, 40, 45, 49, 50, or 53 nucleotides 3′ to the last nucleotide of the second complementarity domain.

[0855] In an embodiment, the targeting domain comprises, has, or consists of, 25 nucleotides (e.g., 25 consecutive nucleotides) having complementarity with the target domain, e.g., the targeting domain is 25 nucleotides in length; and there are at least 16, 19, 21, 26, 31, 32, 36, 41, 46, 50, 51, or 54 nucleotides 3′ to the last nucleotide of the second complementarity domain that is complementary to its corresponding nucleotide of the first complementarity domain.

[0856] In an embodiment, the targeting domain comprises, has, or consists of, 26 nucleotides (e.g., 26 consecutive nucleotides) having complementarity with the target domain, e.g., the targeting domain is 26 nucleotides in length; and the proximal and tail domain, when taken together, comprise at least 15, 18, 20, 25, 30, 31, 35, 40, 45, 49, 50, or 53 nucleotides.

[0857] In an embodiment, the targeting domain comprises, has, or consists of, 26 nucleotides (e.g., 26 consecutive nucleotides) having complementarity with the target domain, e.g., the targeting domain is 26 nucleotides in length; and there are at least 15, 18, 20, 25, 30, 31, 35, 40, 45, 49, 50, or 53 nucleotides 3′ to the last nucleotide of the second complementarity domain.

[0858] In an embodiment, the targeting domain comprises, has, or consists of, 26 nucleotides (e.g., 26 consecutive nucleotides) having complementarity with the target domain, e.g., the targeting domain is 26 nucleotides in length; and there are at least 16, 19, 21, 26, 31, 32, 36, 41, 46, 50, 51, or 54 nucleotides 3′ to the last nucleotide of the second complementarity domain that is complementary to its corresponding nucleotide of the first complementarity domain.

gRNA Modifications

[0859] The activity, stability, or other characteristics of gRNAs can be altered through the incorporation of chemical and/or sequential modifications. As one example, transiently expressed or delivered nucleic acids can be prone to degradation by, e.g., cellular nucleases. Accordingly, the gRNAs described herein can contain one or more modified nucleosides or nucleotides which introduce stability toward nucleases. While not wishing to be bound by theory it is also believed that certain modified gRNAs described herein can exhibit a reduced innate immune response when introduced into a population of cells, particularly the cells of the present invention. As noted above, the term “innate immune response” includes a cellular response to exogenous nucleic acids, including single stranded nucleic acids, generally of viral or bacterial origin, which involves the induction of cytokine expression and release, particularly the interferons, and cell death.

[0860] One common 3′ end modification is the addition of a poly A tract comprising one or more (and typically 5-200) adenine (A) residues. The poly A tract can be contained in the nucleic acid sequence encoding the gRNA, or can be added to the gRNA during chemical synthesis, or following in vitro transcription using a polyadenosine polymerase (e.g., E. coli Poly(A)Polymerase). In vivo, poly-A tracts can be added to sequences transcribed from DNA vectors through the use of polyadenylation signals. Examples of such signals are provided in Maeder.

III. Methods for Designing gRNAs

[0861] Methods for designing gRNAs are described herein, including methods for selecting, designing and validating target domains. Exemplary targeting domains are also provided herein. Targeting Domains discussed herein can be incorporated into the gRNAs described herein.

[0862] Methods for selection and validation of target sequences as well as off-target analyses are described, e.g., in Mali 2013; Hsu 2013; Fu 2014; Heigwer 2014; Bae 2014; Xiao 2014.

[0863] For example, a software tool can be used to optimize the choice of gRNA within a user's target sequence, e.g., to minimize total off-target activity across the genome. Off target activity may be other than cleavage. For each possible gRNA choice using S. pyogenes Cas9, software tools can identify all potential off-target sequences (preceding either NAG or NGG PAMs) across the genome that contain up to a certain number (e.g., 1, 2, 3, 4, 5, 6, 7, 8, 9, or 10) of mismatched base-pairs. The cleavage efficiency at each off-target sequence can be predicted, e.g., using an experimentally-derived weighting scheme. Each possible gRNA can then ranked according to its total predicted off-target cleavage; the top-ranked gRNAs represent those that are likely to have the greatest on-target and the least off-target cleavage. Other functions, e.g., automated reagent design for gRNA vector construction, primer design for the on-target Surveyor assay, and primer design for high-throughput detection and quantification of off-target cleavage via next-generation sequencing, can also be included in the tool. Candidate gRNA molecules can be evaluated by art-known methods or as described in Section V herein.

[0864] Guide RNAs (gRNAs) for use with S. pyogenes, S. aureus and N. meningitidis Cas9s were identified using a DNA sequence searching algorithm. Guide RNA design was carried out using a custom guide RNA design software based on the public tool cas-offinder (Bae 2014). Said custom guide RNA design software scores guides after calculating their genomewide off-target propensity. Typically matches ranging from perfect matches to 7 mismatches are considered for guides ranging in length from 17 to 24. Once the off-target sites are computationally determined, an aggregate score is calculated for each guide and summarized in a tabular output using a web-interface. In addition to identifying potential gRNA sites adjacent to PAM sequences, the software also identifies all PAM adjacent sequences that differ by 1, 2, 3 or more nucleotides from the selected gRNA sites. Genomic DNA sequence for each gene was obtained from the UCSC Genome browser and sequences were screened for repeat elements using the publically available RepeatMasker program. RepeatMasker searches input DNA sequences for repeated elements and regions of low complexity. The output is a detailed annotation of the repeats present in a given query sequence.

[0865] Following identification, gRNAs were ranked into tiers based on their distance to the target site, their orthogonality and presence of a 5′ G (based on identification of close matches in the human genome containing a relevant PAM, e.g., in the case of S. pyogenes, a NGG PAM, in the case of S. aureus, NNGRR (e.g., a NNGRRT or NNGRRV) PAM, and in the case of N. meningitides, a NNNNGATT or NNNNGCTT PAM. Orthogonality refers to the number of sequences in the human genome that contain a minimum number of mismatches to the target sequence. A “high level of orthogonality” or “good orthogonality” may, for example, refer to 20-mer gRNAs that have no identical sequences in the human genome besides the intended target, nor any sequences that contain one or two mismatches in the target sequence. Targeting domains with good orthogonality are selected to minimize off-target DNA cleavage.

[0866] As an example, for S. pyogenes and N. meningitides targets, 17-mer, or 20-mer gRNAs were designed. As another example, for S. aureus targets, 18-mer, 19-mer, 20-mer, 21-mer, 22-mer, 23-mer and 24-mer gRNAs were designed. Targeting domains, disclosed herein, may comprises the 17-mer described in Tables 2A-2D, Tables 3A-3C, Tables 4A-4D, Tables 5A-5D, Tables 6A-6B, Tables 7A-7D, Tables 8A-8D, Tables 9A-9E, Tables 10A-10B, or Table 11, e.g., the targeting domains of 18 or more nucleotides may comprise the 17-mer gRNAs described in Tables 2A-2D, Tables 3A-3C, Tables 4A-4D, Tables 5A-5D, Tables 6A-6B, Tables 7A-7D, Tables 8A-8D, Tables 9A-9E, Tables 10A-10B, or Table 11. Targeting domains, disclosed herein, may comprises the 18-mer described in Tables 2A-2D, Tables 3A-3C, Tables 4A-4D, Tables 5A-5D, Tables 6A-6B, Tables 7A-7D, Tables 8A-8D, Tables 9A-9E, Tables 10A-10B, or Table 11, e.g., the targeting domains of 19 or more nucleotides may comprise the 18-mer gRNAs described in Tables 2A-2D, Tables 3A-3C, Tables 4A-4D, Tables 5A-5D, Tables 6A-6B, Tables 7A-7D, Tables 8A-8D, Tables 9A-9E, Tables 10A-10B, or Table 11. Targeting domains, disclosed herein, may comprises the 19-mer described in Tables 2A-2D, Tables 3A-3C, Tables 4A-4D, Tables 5A-5D, Tables 6A-6B, Tables 7A-7D, Tables 8A-8D, Tables 9A-9E, Tables 10A-10B, or Table 11, e.g., the targeting domains of 20 or more nucleotides may comprise the 19-mer gRNAs described in Tables 2A-2D, Tables 3A-3C, Tables 4A-4D, Tables 5A-5D, Tables 6A-6B, Tables 7A-7D, Tables 8A-8D, Tables 9A-9E, Tables 10A-10B, or Table 11. Targeting domains, disclosed herein, may comprises the 20-mer gRNAs described in Tables 2A-2D, Tables 3A-3C, Tables 4A-4D, Tables 5A-5D, Tables 6A-6B, Tables 7A-7D, Tables 8A-8D, Tables 9A-9E, Tables 10A-10B, or Table 11, e.g., the targeting domains of 21 or more nucleotides may comprise the 20-mer gRNAs described in Tables 2A-2D, Tables 3A-3C, Tables 4A-4D, Tables 5A-5D, Tables 6A-6B, Tables 7A-7D, Tables 8A-8D, Tables 9A-9E, Tables 10A-10B, or Table 11. Targeting domains, disclosed herein, may comprises the 21-mer described in Tables 2A-2D, Tables 3A-3C, Tables 4A-4D, Tables 5A-5D, Tables 6A-6B, Tables 7A-7D, Tables 8A-8D, Tables 9A-9E, Tables 10A-10B, or Table 11, e.g., the targeting domains of 22 or more nucleotides may comprise the 21-mer gRNAs described in Tables 2A-2D, Tables 3A-3C, Tables 4A-4D, Tables 5A-5D, Tables 6A-6B, Tables 7A-7D, Tables 8A-8D, Tables 9A-9E, Tables 10A-10B, or Table 11. Targeting domains, disclosed herein, may comprises the 22-mer described in Tables 2A-2D, Tables 3A-3C, Tables 4A-4D, Tables 5A-5D, Tables 6A-6B, Tables 7A-7D, Tables 8A-8D, Tables 9A-9E, Tables 10A-10B, or Table 11, e.g., the targeting domains of 23 or more nucleotides may comprise the 22-mer gRNAs described in Tables 2A-2D, Tables 3A-3C, Tables 4A-4D, Tables 5A-5D, Tables 6A-6B, Tables 7A-7D, Tables 8A-8D, Tables 9A-9E, Tables 10A-10B, or Table 11. Targeting domains, disclosed herein, may comprises the 23-mer described in Tables 2A-2D, Tables 3A-3C, Tables 4A-4D, Tables 5A-5D, Tables 6A-6B, Tables 7A-7D, Tables 8A-8D, Tables 9A-9E, Tables 10A-10B, or Table 11, e.g., the targeting domains of 24 or more nucleotides may comprise the 23-mer gRNAs described in Tables 2A-2D, Tables 3A-3C, Tables 4A-4D, Tables 5A-5D, Tables 6A-6B, Tables 7A-7D, Tables 8A-8D, Tables 9A-9E, Tables 10A-10B, or Table 11. Targeting domains, disclosed herein, may comprises the 24-mer described in Tables 2A-2D, Tables 3A-3C, Tables 4A-4D, Tables 5A-5D, Tables 6A-6B, Tables 7A-7D, Tables 8A-8D, Tables 9A-9E, Tables 10A-10B, or Table 11, e.g., the targeting domains of 25 or more nucleotides may comprise the 24-mer gRNAs described in Tables 2A-2D, Tables 3A-3C, Tables 4A-4D, Tables 5A-5D, Tables 6A-6B, Tables 7A-7D, Tables 8A-8D, Tables 9A-9E, Tables 10A-10B, or Table 11.

[0867] gRNAs were identified for both single-gRNA nuclease cleavage and for a dual-gRNA paired “nickase” strategy. Criteria for selecting gRNAs and the determination for which gRNAs can be used for the dual-gRNA paired “nickase” strategy is based on two considerations:
[0868] 1. gRNA pairs should be oriented on the DNA such that PAMs are facing out and cutting with the D10A Cas9 nickase will result in 5′ overhangs.
[0869] 2. An assumption that cleaving with dual nickase pairs will result in deletion of the entire intervening sequence at a reasonable frequency. However, cleaving with dual nickase pairs can also result in indel mutations at the site of only one of the gRNAs. Candidate pair members can be tested for how efficiently they remove the entire sequence versus causing indel mutations at the site of one gRNA.

[0870] The Targeting Domains discussed herein can be incorporated into the gRNAs described herein.

[0871] Three strategies were utilized to identify gRNAs for use with S. pyogenes, S. aureus and N. meningitidis Cas9 enzymes.

[0872] In one strategy, gRNAs were designed for use with S. pyogenes and S. aureus Cas9 enzymes to induce an indel mediated by NHEJ in close proximity to or including the LCA10 target position (e.g., c.2991+1655A to G). The gRNAs were identified and ranked into 4 tiers for S. pyogenes (Tables 2A-2D). The targeting domain for tier 1 gRNA molecules to be used with S. pyogenes Cas9 molecules were selected based on (1) a short distance to the target position, e.g., within 40 bp upstream and 40 bp downstream of the mutation, (2) a high level of orthogonality, and (3) the presence of a 5′ G. For selection of tier 2 gRNAs, a short distance and high orthogonality were required but the presence of a 5′G was not required. Tier 3 uses the same distance restriction and the requirement for a 5′G, but removes the requirement of good orthogonality. Tier 4 uses the same distance restriction but removes the requirement of good orthogonality and the 5′G. The gRNAs were identified and ranked into 4 tiers for S. aureus, when the relevant PAM was NNGRR (Tables 3A-3C). The targeting domain for tier 1 gRNA molecules to be used with S. pyogenes Cas9 molecules were selected based on (1) a short distance to the target position, e.g., within 40 bp upstream and 40 bp downstream of the mutation, (2) a high level of orthogonality, and (3) the presence of a 5′ G. For selection of tier 2 gRNAs, a short distance and high orthogonality were required but the presence of a 5′G was not required. Tier 3 uses the same distance restriction and the requirement for a 5′G, but removes the requirement of good orthogonality. Tier 4 uses the same distance restriction but removes the requirement of good orthogonality and the 5′G. The gRNAs were identified and ranked into 5 tiers for S. aureus when the relevant PAM was NNGRRT or NNGRRV (Tables 7A-7D). The targeting domain for tier 1 gRNA molecules to be used with S. aureus Cas9 molecules were selected based on (1) a short distance to the target position, e.g., within 40 bp upstream and 40 bp downstream of the mutation, (2) a high level of orthogonality, (3) the presence of a 5′ G and (4) PAM was NNGRRT. For selection of tier 2 gRNAs, a short distance and high orthogonality were required but the presence of a 5′G was not required, and PAM was NNGRRT. Tier 3 uses the same distance restriction and the requirement for a 5′G, but removes the requirement of good orthogonality, and PAM was NNGRRT. Tier 4 uses the same distance restriction but removes the requirement of good orthogonality and the 5′G, and PAM was NNGRRT. Tier 5 required a short distance to the target position, e.g., within 40 bp upstream and 40 bp downstream of the mutation and PAM was NNGRRV. Note that tiers are non-inclusive (each gRNA is listed only once for the strategy). In certain instances, no gRNA was identified based on the criteria of the particular tier.

[0873] In a second strategy, gRNAs were designed for use with S. pyogenes, S. aureus and N. meningitidis Cas9 molecules to delete a genomic sequence including the mutation at the LCA10 target position (e.g., c.2991+1655A to G), e.g., mediated by NHEJ. The gRNAs were identified and ranked into 4 tiers for S. pyogenes (Tables 4A-4D). The targeting domain to be used with S. pyogenes Cas9 molecules for tier 1 gRNA molecules were selected based on (1) flanking the mutation without targeting unwanted chromosome elements, such as an Alu repeat, e.g., within 400 bp upstream of an Alu repeat or 700 bp downstream of mutation, (2) a high level of orthogonality, and (3) the presence of a 5′ G. For selection of tier 2 gRNAs, a reasonable distance and high orthogonality were required but the presence of a 5′G was not required. Tier 3 uses the same distance restriction and the requirement for a 5′G, but removes the requirement of good orthogonality. Tier 4 uses the same distance restriction but removes the requirement of good orthogonality and the 5′G. The gRNAs were identified and ranked into 4 tiers for S. aureus, when the relevant PAM was NNGRR (Tables 5A-5D). The targeting domain to be used with S. aureus Cas9 molecules for tier 1 gRNA molecules were selected based on (1) flanking the mutation without targeting unwanted chromosome elements, such as an Alu repeat, e.g., within 400 bp upstream of an Alu repeat or 700 bp downstream of mutation, (2) a high level of orthogonality, and (3) the presence of a 5′ G. For selection of tier 2 gRNAs, a reasonable distance and high orthogonality were required but the presence of a 5′G was not required. Tier 3 uses the same distance restriction and the requirement for a 5′G, but removes the requirement of good orthogonality. Tier 4 uses the same distance restriction but removes the requirement of good orthogonality and the 5′G. The gRNAs were identified and ranked into 2 tiers for N. meningitides (Tables 6A-6B). The targeting domain to be used with N. meningitides Cas9 molecules for tier 1 gRNA molecules were selected based on (1) flanking the mutation without targeting unwanted chromosome elements, such as an Alu repeat, e.g., within 400 bp upstream of an Alu repeat or 700 bp downstream of mutation, (2) a high level of orthogonality, and (3) the presence of a 5′ G. For selection of tier 2 gRNAs, a reasonable distance and high orthogonality were required but the presence of a 5′G was not required. Note that tiers are non-inclusive (each gRNA is listed only once for the strategy). In certain instances, no gRNA was identified based on the criteria of the particular tier. In a third strategy, gRNAs were designed for use with S. pyogenes, S. aureus and N. meningitidis Cas9 molecules to delete a genomic sequence including the mutation at the LCA10 target position (e.g., c.2991+1655A to G), e.g., mediated by NHEJ. The gRNAs were identified and ranked into 4 tiers for S. pyogenes (Tables 8A-8D). The targeting domain to be used with S. pyogenes Cas9 enzymes for tier 1 gRNA molecules were selected based on (1) flanking the mutation without targeting unwanted chromosome elements, such as an Alu repeat, e.g., within 1000 bp upstream of an Alu repeat or 1000 bp downstream of mutation, (2) a high level of orthogonality, (3) the presence of a 5′ G and (4) and PAM was NNGRRT. For selection of tier 2 gRNAs, a reasonable distance and high orthogonality were required but the presence of a 5′G was not required, and PAM was NNGRRT. Tier 3 uses the same distance restriction and the requirement for a 5′G, but removes the requirement of good orthogonality, and PAM was NNGRRT. Tier 4 uses the same distance restriction but removes the requirement of good orthogonality and the 5′G, and PAM was NNGRRT. The gRNAs were identified and ranked into 4 tiers for S. aureus, when the relevant PAM was NNGRRT or NNGRRV (Tables 9A-9E). The targeting domain to be used with S. aureus Cas9 enzymes for tier 1 gRNA molecules were selected based on (1) flanking the mutation without targeting unwanted chromosome elements, such as an Alu repeat, e.g., within 1000 bp upstream of an Alu repeat or 1000 bp downstream of mutation, (2) a high level of orthogonality, and (3) the presence of a 5′ G. For selection of tier 2 gRNAs, a reasonable distance and high orthogonality were required but the presence of a 5′G was not required. Tier 3 uses the same distance restriction and the requirement for a 5′G, but removes the requirement of good orthogonality. Tier 4 uses the same distance restriction but removes the requirement of good orthogonality and the 5′G. Tier 5 used the same distance restriction and PAM was NNGRRV. The gRNAs were identified and ranked into 2 tiers for N. meningitides (Tables 10A-10B). The targeting domain to be used with N. meningitides Cas9 molecules for tier 1 gRNA molecules were selected based on (1) flanking the mutation without targeting unwanted chromosome elements, such as an Alu repeat, e.g., within 1000 bp upstream of an Alu repeat or 1000 bp downstream of mutation, (2) a high level of orthogonality, and (3) the presence of a 5′ G. For selection of tier 2 gRNAs, a reasonable distance and high orthogonality were required but the presence of a 5′G was not required. Note that tiers are non-inclusive (each gRNA is listed only once for the strategy). In certain instances, no gRNA was identified based on the criteria of the particular tier.

[0874] In an embodiment, when a single gRNA molecule is used to target a Cas9 nickase to create a single strand break to introduce a break-induced indel in close proximity to or including the LCA10 target position, the gRNA is used to target either upstream of (e.g., within 40 bp upstream of the LCA10 target position), or downstream of (e.g., within 40 bp downstream of the LCA10 target position) in the CEP290 gene.

[0875] In an embodiment, when a single gRNA molecule is used to target a Cas9 nuclease to create a double strand break to introduce a break-induced indel in close proximity to or including the LCA10 target position, the gRNA is used to target either upstream of (e.g., within 40 bp upstream of the LCA10 target position), or downstream of (e.g., within 40 bp downstream of the LCA10 target position) in the CEP290 gene.

[0876] In an embodiment, dual targeting is used to create two double strand breaks to delete a genomic sequence including the mutation at the LCA10 target position, e.g., mediated by NHEJ. In an embodiment, the first and second gRNAs are used target two Cas9 nucleases to flank, e.g., the first of gRNA is used to target upstream of (e.g., within 400 bp upstream of the Alu repeat, or within 40 bp upstream of the LCA10 target position), and the second gRNA is used to target downstream of (e.g., within 700 bp downstream of the LCA10 target position) in the CEP290 gene.

[0877] In an embodiment, dual targeting is used to create a double strand break and a pair of single strand breaks to delete a genomic sequence including the mutation at the LCA10 target position, e.g., mediated by NHEJ. In an embodiment, the first, second and third gRNAs are used to target one Cas9 nuclease and two Cas9 nickases to flank, e.g., the first gRNA that will be used with the Cas9 nuclease is used to target upstream of (e.g., within 400 bp upstream of the Alu repeat, or within 40 bp upstream of the LCA10 target position) or downstream of (e.g., within 700 bp downstream) of the LCA10 target position, and the second and third gRNAs that will be used with the Cas9 nickase pair are used to target the opposite side of the LCA10 target position (e.g., within 400 bp upstream of the Alu repeat, within 40 bp upstream of the LCA10 target position, or within 700 bp downstream of the LCA10 target position) in the CEP290 gene.

[0878] In an embodiment, when four gRNAs (e.g., two pairs) are used to target four Cas9 nickases to create four single strand breaks to delete genomic sequence including the mutation at the LCA10 target position, e.g., mediated by NHEJ, the first pair and second pair of gRNAs are used to target four Cas9 nickases to flank, e.g., the first pair of gRNAs are used to target upstream of (e.g., within 400 bp upstream of the Alu repeat, or within 40 bp upstream of the LCA10 target position), and the second pair of gRNAs are used to target downstream of (e.g., within 700 bp downstream of the LCA10 target position) in the CEP290 gene.

[0879] In an embodiment, dual targeting is utilized to delete genomic sequence including the mutation at the LCA10 target position mediated by NHEJ. It is contemplated herein that in an embodiment any upstream gRNA (e.g., within 400 bp upstream of an Alu repeat, or within 40 bp upstream of the LCA10 target position) in Tables 2A-2C and Tables 4A-4D can be paired with any downstream gRNA (e.g., within 700 downstream of LCA10 target position) in Tables 4A-4D to be used with a S. pyogenes Cas9 molecule to generate dual targeting. Exemplary pairs including selecting a targeting domain that is labeled as upstream from Tables 2A-2C or Tables 4A-4D and a second targeting domain that is labeled as downstream from Tables 4A-4D. In an embodiment, a targeting domain that is labeled as upstream in Tables 2A-2C or Tables 4A-4D can be combined with any of the targeting domains that is labeled as downstream in Tables 4A-4D.

[0880] In an embodiment, dual targeting is utilized to delete genomic sequence including the mutation at the LCA10 target position mediated by NHEJ. It is contemplated herein that in an embodiment any upstream gRNA (e.g., within 400 bp upstream of an Alu repeat, or within 40 bp upstream of the LCA10 target position) in Tables 3A-3C and Tables 5A-5D can be paired with any downstream gRNA (e.g., within 700 downstream of LCA10 target position) in Tables 5A-5D to be used with a S. aureus Cas9 molecule to generate dual targeting. Exemplary pairs include selecting a targeting domain that is labeled as upstream from Tables 3A-3C or Tables 5A-5D and a second targeting domain that is labeled as downstream from Tables 5A-5D. In an embodiment, a targeting domain that is labeled as upstream in Tables 3A-3C or Tables 5A-5D can be combined with any of the targeting domains that is labeled as downstream in Tables 5A-5D.

[0881] In an embodiment, dual targeting is utilized to delete genomic sequence including the mutation at the LCA10 target position mediated by NHEJ. It is contemplated herein that in an embodiment any upstream gRNA (e.g., within 400 bp upstream of an Alu repeat, or within 40 bp upstream of the LCA10 target position) in Tables 6A-6B can be paired with any downstream gRNA (e.g., within 700 downstream of LCA10 target position) in Tables 6A-6B to be used with a N. meningitidis Cas9 molecule to generate dual targeting. Exemplary pairs include selecting a targeting domain that is labeled as upstream from Tables 6A-6B and a second targeting domain that is labeled as downstream from Tables 6A-6B. In an embodiment, a targeting domain that is labeled as upstream in Tables 6A-6B can be combined with any of the targeting domains that is labeled as downstream in Tables 6A-6B.

[0882] In an embodiment, dual targeting (e.g., dual double strand cleavage) is used to create two double strand breaks to delete a genomic sequence including the mutation at the LCA10 target position, e.g., mediated by NHEJ. In an embodiment, the first and second gRNAs are used target two Cas9 nucleases to flank, e.g., the first of gRNA is used to target upstream of (e.g., within 1000 bp upstream of the Alu repeat, or within 40 bp upstream of the LCA10 target position), and the second gRNA is used to target downstream of (e.g., within 1000 bp downstream of the LCA10 target position) in the CEP290 gene.

[0883] In an embodiment, dual targeting (e.g., dual double strand cleavage) is used to create a double strand break and a pair of single strand breaks to delete a genomic sequence including the mutation at the LCA10 target position, e.g., mediated by NHEJ. In an embodiment, the first, second and third gRNAs are used to target one Cas9 nuclease and two Cas9 nickases to flank, e.g., the first gRNA that will be used with the Cas9 nuclease is used to target upstream of (e.g., within 1000 bp upstream of the Alu repeat, or within 40 bp upstream of the LCA10 target position) or downstream of (e.g., within 1000 bp downstream) of the LCA10 target position, and the second and third gRNAs that will be used with the Cas9 nickase pair are used to target the opposite side of the LCA10 target position (e.g., within 1000 bp upstream of the Alu repeat, or within 40 bp upstream of the LCA10 target position or within 1000 bp downstream of the LCA10 target position) in the CEP290 gene.

[0884] In an embodiment, when four gRNAs (e.g., two pairs) are used to target four Cas9 nickases to create four single strand breaks to delete genomic sequence including the mutation at the LCA10 target position, e.g., mediated by NHEJ, the first pair and second pair of gRNAs are used to target four Cas9 nickases to flank, e.g., the first pair of gRNAs are used to target upstream of (e.g., within 1000 bp upstream of the Alu repeat, or within 40 bp upstream of the LCA10 target position), and the second pair of gRNAs are used to target downstream of (e.g., within 1000 bp downstream of the LCA10 target position) in the CEP290 gene.

[0885] In an embodiment, dual targeting is utilized to delete genomic sequence including the mutation at the LCA10 target position, e.g., mediated by NHEJ. It is contemplated herein that in an embodiment any upstream gRNA (e.g., within 1000 bp upstream of an Alu repeat, or within 40 bp upstream of the LCA10 target position) in Tables 2A-2C, Tables 4A-4D, or Tables 8A-8D can be paired with any downstream gRNA (e.g., within 1000 downstream of LCA10 target position) in Tables 2A-2C, Tables 4A-4D, or Tables 8A-8D to be used with a S. pyogenes Cas9 molecule to generate dual targeting. Exemplary pairs including selecting a targeting domain that is labeled as upstream from Tables 2A-2C, Tables 4A-4D, or Tables 8A-8D and a second targeting domain that is labeled as downstream from Tables 2A-2C, Tables 4A-4D, or Tables 8A-8D. In an embodiment, a targeting domain that is labeled as upstream in Tables 2A-2C, Tables 4A-4D, or Tables 8A-8D can be combined with any of the targeting domains that is labeled as downstream in Tables 2A-2C, Tables 4A-4D, or Tables 8A-8D.

[0886] In an embodiment, dual targeting is utilized to delete genomic sequence including the mutation at the LCA10 target position mediated by NHEJ. It is contemplated herein that in an embodiment any upstream gRNA (e.g., within 1000 bp upstream of an Alu repeat, or within 40 bp upstream of the LCA10 target position) in Tables 3A-3C, Tables 5A-5D, Tables 7A-7D, or Tables 9A-9E can be paired with any downstream gRNA (e.g., within 1000 downstream of LCA10 target position) in Tables 3A-3C, Tables 5A-5D, Tables 7A-7D, or Tables 9A-9E to be used with a S. aureus Cas9 molecule to generate dual targeting. Exemplary pairs include selecting a targeting domain that is labeled as upstream from Tables 3A-3C, Tables 5A-5D, Tables 7A-7D, or Tables 9A-9E and a second targeting domain that is labeled as downstream from Tables 3A-3C, Tables 5A-5D, Tables 7A-7D, or Tables 9A-9E. In an embodiment, a targeting domain that is labeled as upstream in Tables 3A-3C, Tables 5A-5D, Tables 7A-7D, or Tables 9A-9E can be combined with any of the targeting domains that is labeled as downstream in Tables 3A-3C, Tables 5A-5D, Tables 7A-7D, or Tables 9A-9E.

[0887] In an embodiment, dual targeting is utilized to delete genomic sequence including the mutation at the LCA10 target position, e.g., mediated by NHEJ. It is contemplated herein that in an embodiment any upstream gRNA (e.g., within 1000 bp upstream of an Alu repeat, or within 40 bp upstream of the LCA10 target position) in Tables 6A-6B or Tables 10A-10B can be paired with any downstream gRNA (e.g., within 1000 downstream of LCA10 target position) in Tables 6A-6D to be used with a N. meningitidis Cas9 molecule to generate dual targeting. Exemplary pairs include selecting a targeting domain that is labeled as upstream from Tables 6A-6B or Tables 10A-10B and a second targeting domain that is labeled as downstream from Tables 6A-6B or Tables 10A-10B. In an embodiment, a targeting domain that is labeled as upstream in Tables 6A-6B or Tables 10A-10B and can be combined with any of the targeting domains that is labeled as downstream in Tables 6A-6B or Tables 10A-10B.

[0888] Any of the targeting domains in the tables described herein can be used with a Cas9 nickase molecule to generate a single strand break.

[0889] Any of the targeting domains in the tables described herein can be used with a Cas9 nuclease molecule to generate a double strand break.

[0890] In an embodiment, dual targeting (e.g., dual nicking) is used to create two nicks on opposite DNA strands by using S. pyogenes, S. aureus and N. meningitidis Cas9 nickases with two targeting domains that are complementary to opposite DNA strands, e.g., a gRNA comprising any minus strand targeting domain may be paired any gRNA comprising a plus strand targeting domain provided that the two gRNAs are oriented on the DNA such that PAMs face outward and the distance between the 5′ ends of the gRNAs is 0-50 bp. Exemplary nickase pairs including selecting a targeting domain from Group A and a second targeting domain from Group B in Table 2D (for S. pyogenes), or selecting a targeting domain from Group A and a second targeting domain from Group B in Table 7D (for S. aureus). It is contemplated herein that in an embodiment a targeting domain of Group A can be combined with any of the targeting domains of Group B in Table 2D (for S. pyogenes). For example, CEP290-B5 or CEP290-B10 can be combined with CEP290-B1 or CEP290-B6. It is contemplated herein that in an embodiment a targeting domain of Group A can be combined with any of the targeting domains of Group B in Table 7D (for S. aureus). For example, CEP290-12 or CEP290-17 can be combined with CEP290-11 or CEP290-16.

[0891] In an embodiment, dual targeting (e.g., dual double strand cleavage) is used to create two double strand breaks by using S. pyogenes, S. aureus and N. meningitidis Cas9 nucleases with two targeting domains. It is contemplated herein that in an embodiment any upstream gRNA of any of Tables 2A-2C, Tables 3A-3C, Tables 4A-4D, Tables 5A-5D, Tables 6A-6B, Tables 7A-7C, Tables 8A-8D, Tables 9A-9E, or Tables 10A-10B can be paired with any downstream gRNA of any of Tables 2A-2C, Tables 3A-3C, Tables 4A-4D, Tables 5A-5D, Tables 6A-6B, Tables 7A-7C, Tables 8A-8D, Tables 9A-9E, or Tables 10A-10B. Exemplary nucleases pairs are shown in Table 11, e.g., CEP290-323 can be combined with CEP290-11, CEP290-323 can be combined with CEP290-64, CEP290-490 can be combined with CEP290-496, CEP290-490 can be combined with CEP290-502, CEP290-490 can be combined with CEP290-504, CEP290-492 can be combined with CEP290-502, or CEP290-492 can be combined with CEP290-504.

[0892] It is contemplated herein that any upstream gRNA described herein may be paired with any downstream gRNA described herein. When an upstream gRNA designed for use with one species of Cas9 is paired with a downstream gRNA designed for use from a different species of Cas9, both Cas9 species are used to generate a single or double-strand break, as desired.

### Exemplary Targeting Domains

[0893] Table 2A provides targeting domains for NHEJ-mediated introduction of an indel in close proximity to or including the LCA10 target position in the CEP290 gene selected according to the first tier parameters. The targeting domains are within 40 bases of the LCA10 target position, have good orthogonality, and start with G. It is contemplated herein that the targeting domain hybridizes to the target domain through complementary base pairing. Any of the targeting domains in the table can be used with a S. pyogenes Cas9 molecule that generates a double stranded break (Cas9 nuclease) or a single-stranded break (Cas9 nickase).

TABLE 2A

| | | | Target | |
|---|---|---|---|---|
| | DNA | | Site | Position relative |
| gRNA Name | Strand | Targeting Domain | Length | to mutation |
| CEP290-B4 | + | GAGAUACUCACAAUUACAAC | 20 | upstream |
| | | (SEQ ID NO: 395) | | |
| CEP290-B28 | + | GAUACUCACAAUUACAACUG | 20 | upstream |
| | | (SEQ ID NO: 396) | | |

[0894] Table 2B provides targeting domains for NHEJ-mediated introduction of an indel in close proximity to or including the LCA10 target position in the CEP290 gene selected according to the second tier parameters. The targeting domains are within 40 bases of the LCA10 target position, have good orthogonality, and do not start with G. It is contemplated herein that the targeting domain hybridizes to the target domain through complementary base pairing. Any of the targeting domains in the table can be used with a S. pyogenes Cas9 molecule that generates a double stranded break (Cas9 nuclease) or a single-stranded break (Cas9 nickase).

TABLE 2B

| | | | Target | Position |
|---|---|---|---|---|
| | DNA | | Site | relative to |
| gRNA Name | Strand | Targeting Domain | Length | mutation |
| CEP290-B6 | − | CUCAUACCUAUCCCUAU | 17 | downstream |
| | | (SEQ ID NO: 594) | | |
| CEP290-B20 | + | ACACUGCCAAUAGGGAU | 17 | downstream |
| | | (SEQ ID NO: 595) | | |
| CEP290-B10 | + | CAAUUACAACUGGGGCC | 17 | upstream |
| | | (SEQ ID NO: 596) | | |
| CEP290-B21 | + | CUAAGACACUGCCAAUA | 17 | downstream |
| | | (SEQ ID NO: 597) | | |
| CEP290-B9 | + | AUACUCACAAUUACAAC | 17 | upstream |
| | | (SEQ ID NO: 598) | | |
| CEP290-B1 | − | UAUCUCAUACCUAUCCCUAU | 20 | downstream |
| | | (SEQ ID NO: 599) | | |
| CEP290-B29 | + | AAGACACUGCCAAUAGGGAU | 20 | downstream |
| | | (SEQ ID NO: 600) | | |
| CEP290-B5 | + | UCACAAUUACAACUGGGGCC | 20 | upstream |
| | | (SEQ ID NO: 601) | | |
| CEP290-B30 | + | AGAUACUCACAAUUACAACU | 20 | upstream |
| | | (SEQ ID NO: 602) | | |

[0895] Table 2C provides targeting domains for NHEJ-mediated introduction of an indel in close proximity to or including the LCA10 target position in the CEP290 gene selected according to the fourth tier parameters. The targeting domains are within 40 bases of the LCA10 target position and do not start with G. It is contemplated herein that the targeting domain hybridizes to the target domain through complementary base pairing. Any of the targeting domains in the table can be used with a S. pyogenes Cas9 molecule that generates a double stranded break (Cas9 nuclease) or a single-stranded break (Cas9 nickase).

TABLE 2C

| | | | Target | Position |
|---|---|---|---|---|
| | DNA | | Site | relative to |
| gRNA Name | Strand | Targeting Domain | Length | mutation |
| CEP290-B22 | + | ACUAAGACACUGCCAAU (SEQ | 17 | downstream |
| | | ID NO: 603) | | |
| CEP290-B23 | + | UACUCACAAUUACAACU (SEQ | 17 | upstream |
| | | ID NO: 604) | | |
| CEP290-B24 | + | ACUCACAAUUACAACUG (SEQ | 17 | upstream |
| | | ID NO: 605) | | |
| CEP290-B25 | + | ACAACUGGGGCCAGGUG (SEQ | 17 | upstream |
| | | ID NO: 606) | | |
| CEP290-B26 | + | ACUGGGGCCAGGUGCGG (SEQ | 17 | upstream |
| | | ID NO: 607) | | |
| CEP290-B27 | − | AUGUGAGCCACCGCACC (SEQ | 17 | upstream |
| | | ID NO: 608) | | |
| CEP290-B31 | + | AAACUAAGACACUGCCAAUA | 20 | downstream |
| | | (SEQ ID NO: 609) | | |
| CEP290-B32 | + | AAAACUAAGACACUGCCAAU | 20 | upstream |
| | | (SEQ ID NO: 610) | | |
| CEP290-B33 | + | AUUACAACUGGGGCCAGGUG | 20 | upstream |
| | | (SEQ ID NO: 611) | | |
| CEP290-B34 | + | ACAACUGGGGCCAGGUGCGG | 20 | upstream |
| | | (SEQ ID NO: 612) | | |

[0896] Table 2D provides targeting domains for NHEJ-mediated introduction of an indel in close proximity to or including the LCA10 target position in the CEP290 gene that can be used for dual targeting. Any of the targeting domains in the table can be used with a S. pyogenes Cas9 (nickase) molecule to generate a single stranded break.

[0897] Exemplary nickase pairs including selecting a targeting domain from Group A and a second targeting domain from Group B. It is contemplated herein that a targeting domain of Group A can be combined with any of the targeting domains of Group B. For example, the CEP290-B5 or CEP290-B10 can be combined with CEP290-B1 or CEP290-B6.

TABLE 2D

| Group A | Group B |
|---|---|
| CEP290-B5 | CEP290-B1 |
| CEP290-B10 | CEP290-B6 |

[0898] Table 3A provides targeting domains for NHEJ-mediated introduction of an indel in close proximity to or including the LCA10 target position in the CEP290 gene selected according to the first tier parameters. The targeting domains are within 40 bases of the LCA10 target position, have good orthogonality, and start with G. It is contemplated herein that the targeting domain hybridizes to the target domain through complementary base pairing. Any of the targeting domains in the table can be used with a S. aureus Cas9 molecule that generates a double stranded break (Cas9 nuclease) or a single-stranded break (Cas9 nickase).

TABLE 3A

| | | | Target | |
|---|---|---|---|---|
| | DNA | | Site | Position relative |
| gRNA Name | Strand | Targeting Domain | Length | to mutation |
| CEP290-B1000 | + | GAGAUACUCACAAUUACAAC | 20 | upstream |
| | | (SEQ ID NO: 395) | | |
| CEP290-B1001 | + | GAUACUCACAAUUACAA | 17 | upstream |
| | | (SEQ ID NO: 397) | | |

[0899] Table 3B provides targeting domains for NHEJ-mediated introduction of an indel in close proximity to or including the LCA10 target position in the CEP290 gene selected according to the second tier parameters. The targeting domains are within 40 bases of the LCA10 target position, have good orthogonality, and do not start with G. It is contemplated herein that the targeting domain hybridizes to the target domain through complementary base pairing. Any of the targeting domains in the table can be used with a S. aureus Cas9 molecule that generates a double stranded break (Cas9 nuclease) or a single-stranded break (Cas9 nickase).

TABLE 3B

| | | | Target | Position |
|---|---|---|---|---|
| | DNA | | Site | relative to |
| gRNA Name | Strand | Targeting Domain | Length | mutation |
| CEP290-B1002 | + | CACUGCCAAUAGGGAUAGGU | 20 | downstream |
| | | (SEQ ID NO: 613) | | |
| CEP290-B1003 | + | UGCCAAUAGGGAUAGGU (SEQ | 17 | downstream |
| | | ID NO: 614) | | |
| CEP290-B1004 | + | UGAGAUACUCACAAUUACAA | 20 | upstream |
| | | (SEQ ID NO: 615) | | |
| CEP290-B1005 | + | AUACUCACAAUUACAAC (SEQ | 17 | upstream |
| | | ID NO: 598) | | |

[0900] Table 3C provides targeting domains for NHEJ-mediated introduction of an indel in close proximity to or including the LCA10 target position in the CEP290 gene selected according to the fourth tier parameters. The targeting domains are within 40 bases of the LCA10 target position, and do not start with G. It is contemplated herein that the targeting domain hybridizes to the target domain through complementary base pairing. Any of the targeting domains in the table can be used with a S. aureus Cas9 molecule that generates a double stranded break (Cas9 nuclease) or a single-stranded break (Cas9 nickase).

TABLE 3C

| | | | Target | |
|---|---|---|---|---|
| | DNA | | Site | Position relative |
| gRNA Name | Strand | Targeting Domain | Length | to mutation |
| CEP290-B1006 | − | ACCUGGCCCCAGUUGUAAUU | 20 | upstream |
| | | (SEQ ID NO: 616) | | |
| CEP290-B1007 | − | UGGCCCCAGUUGUAAUU | 17 | upstream |
| | | (SEQ ID NO: 617) | | |

[0901] Table 4A provides targeting domains for break-induced deletion of genomic sequence including the mutation at the LCA10 target position in the CEP290 gene selected according to the first tier parameters. The targeting domains are within 400 bp upstream of an Alu repeat or 700 bp downstream of the mutation, have good orthogonality, and start with G. It is contemplated herein that the targeting domain hybridizes to the target domain through complementary base pairing. Any of the targeting domains in the table can be used with a S. pyogenes Cas9 molecule that generates a double stranded break (Cas9 nuclease) or a single-stranded break (Cas9 nickase).

TABLE 4A

| | | | Target | Position |
|---|---|---|---|---|
| | DNA | | Site | relative to |
| gRNA Name | Strand | Targeting Domain | Length | mutation |
| CEP290-B8 | − | GCUACCGGUUACCUGAA | 17 | downstream |
| | | (SEQ ID NO: 457) | | |
| CEP290-B217 | + | GCAGAACUAGUGUAGAC | 17 | downstream |
| | | (SEQ ID NO: 458) | | |
| CEP290-B69 | − | GUUGAGUAUCUCCUGUU | 17 | downstream |
| | | (SEQ ID NO: 459) | | |
| CEP290-B115 | + | GAUGCAGAACUAGUGUAGAC | 20 | downstream |
| | | (SEQ ID NO: 460) | | |
| CEP290-B187 | + | GCUUGAACUCUGUGCCAAAC | 20 | downstream |
| | | (SEQ ID NO: 461) | | |

[0902] Table 4B provides targeting domains for break-induced deletion of genomic sequence including the mutation at the LCA10 target position in the CEP290 gene selected according to the second tier parameters. The targeting domains are within 400 bp upstream of an Alu repeat or 700 bp downstream of the mutation, have good orthogonality, and do not start with G. It is contemplated herein that the targeting domain hybridizes to the target domain through complementary base pairing. Any of the targeting domains in the table can be used with a S. pyogenes Cas9 molecule that generates a double stranded break (Cas9 nuclease) or a single-stranded break (Cas9 nickase).

TABLE 4B

| | | | Target | Position |
|---|---|---|---|---|
| | DNA | | Site | relative to |
| gRNA Name | Strand | Targeting Domain | Length | mutation |
| CEP290-B269 | − | AGCUACCGGUUACCUGA | 17 | downstream |
| | | (SEQ ID NO: 618) | | |
| CEP290-B285 | + | UUUAAGGCGGGGAGUCACAU | 20 | downstream |
| | | (SEQ ID NO: 619) | | |
| CEP290-B3 | − | AAAGCUACCGGUUACCUGAA | 20 | downstream |
| | | (SEQ ID NO: 620) | | |
| CEP290-B207 | − | AAAAGCUACCGGUUACCUGA | 20 | downstream |
| | | (SEQ ID NO: 621) | | |
| CEP290-B106 | − | CUCAUACCUAUCCCUAU (SEQ | 17 | downstream |
| | | ID NO: 594) | | |
| CEP290-B55 | + | ACACUGCCAAUAGGGAU | 17 | downstream |
| | | (SEQ ID NO: 595) | | |
| CEP290-B138 | − | UAUCUCAUACCUAUCCCUAU | 20 | downstream |
| | | (SEQ ID NO: 599) | | |
| CEP290-B62 | − | ACGUGCUCUUUUCUAUAUAU | 20 | downstream |
| | | (SEQ ID NO: 622) | | |
| CEP290-B121 | + | AUUUGACACCACAUGCACUG | 20 | downstream |
| | | (SEQ ID NO: 623) | | |
| CEP290-B120 | − | CGUGCUCUUUUCUAUAUAUA | 20 | downstream |
| | | (SEQ ID NO: 624) | | |
| CEP290-B36 | − | UGGUGUCAAAUAUGGUGCUU | 20 | downstream |
| | | (SEQ ID NO: 625) | | |
| CEP290-B236 | + | ACUUUUACCCUUCAGGUAAC | 20 | downstream |
| | | (SEQ ID NO: 626) | | |
| CEP290-B70 | − | AGUGCAUGUGGUGUCAAAUA | 20 | downstream |
| | | (SEQ ID NO: 627) | | |
| CEP290-B177 | − | UACAUGAGAGUGAUUAGUGG | 20 | downstream |
| | | (SEQ ID NO: 628) | | |
| CEP290-B451 | − | CGUUGUUCUGAGUAGCUUUC | 20 | upstream |
| | | (SEQ ID NO: 629) | | |
| CEP290-B452 | + | CCACAAGAUGUCUCUUGCCU | 20 | upstream |
| | | (SEQ ID NO: 630) | | |
| CEP290-B453 | − | CCUAGGCAAGAGACAUCUUG | 20 | upstream |
| | | (SEQ ID NO: 631) | | |
| CEP290-B454 | + | UGCCUAGGACUUUCUAAUGC | 20 | upstream |
| | | (SEQ ID NO: 632) | | |
| CEP290-B498 | − | CGUUGUUCUGAGUAGCUUUC | 20 | upstream |
| | | (SEQ ID NO: 629) | | |
| CEP290-B523 | − | AUUAGCUCAAAAGCUUUUGC | 20 | upstream |
| | | (SEQ ID NO: 633) | | |

[0903] Table 4C provides targeting domains for break-induced deletion of genomic sequence including the mutation at the LCA10 target position in the CEP290 gene selected according to the third tier parameters. The targeting domains are within 400 bp upstream of an Alu repeat or 700 bp downstream of the mutation, and start with G. It is contemplated herein that the targeting domain hybridizes to the target domain through complementary base pairing. Any of the targeting domains in the table can be used with a S. pyogenes Cas9 molecule that generates a double stranded break (Cas9 nuclease) or a single-stranded break (Cas9 nickase).

TABLE 4C

| | | | Target | Position |
|---|---|---|---|---|
| | DNA | | Site | relative to |
| gRNA Name | Strand | Targeting Domain | Length | mutation |
| CEP290-B87 | − | GCAUGUGGUGUCAAAUA | 17 | downstream |
| | | (SEQ ID NO: 479) | | |
| CEP290-B50 | + | GAUGACAUGAGGUAAGU | 17 | downstream |
| | | (SEQ ID NO: 478) | | |
| CEP290-B260 | + | GUCACAUGGGAGUCACA | 17 | downstream |
| | | (SEQ ID NO: 500) | | |
| CEP290-B283 | − | GAGAGCCACAGUGCAUG | 17 | downstream |
| | | (SEQ ID NO: 472) | | |
| CEP290-B85 | − | GCUCUUUUCUAUAUAUA | 17 | downstream |
| | | (SEQ ID NO: 481) | | |
| CEP290-B78 | + | GCUUUUGACAGUUUUUA | 17 | downstream |
| | | (SEQ ID NO: 634) | | |
| CEP290-B292 | + | GAUAGAGACAGGAAUAA | 17 | downstream |
| | | (SEQ ID NO: 476) | | |
| CEP290-B278 | + | GGACUUGACUUUUACCCUUC | 20 | downstream |
| | | (SEQ ID NO: 485) | | |
| CEP290-B227 | + | GGGAGUCACAUGGGAGUCAC | 20 | downstream |
| | | (SEQ ID NO: 491) | | |
| CEP290-B261 | − | GUGGAGAGCCACAGUGCAUG | 20 | downstream |
| | | (SEQ ID NO: 501) | | |
| CEP290-B182 | + | GCCUGAACAAGUUUUGAAAC | 20 | downstream |
| | | (SEQ ID NO: 480) | | |
| CEP290-B67 | + | GGAGUCACAUGGGAGUCACA | 20 | downstream |
| | | (SEQ ID NO: 487) | | |
| CEP290-B216 | + | GUAAGACUGGAGAUAGAGAC | 20 | downstream |
| | | (SEQ ID NO: 497) | | |
| CEP290-B241 | + | GCUUUUGACAGUUUUUAAGG | 20 | downstream |
| | | (SEQ ID NO: 482) | | |
| CEP290-B161 | + | GUUUAGAAUGAUCAUUCUUG | 20 | downstream |
| | | (SEQ ID NO: 504) | | |
| CEP290-B259 | + | GUAGCUUUUGACAGUUUUUA | 20 | downstream |
| | | (SEQ ID NO: 499) | | |
| CEP290-B79 | + | GGAGAUAGAGACAGGAAUAA | 20 | downstream |
| | | (SEQ ID NO: 635) | | |
| CEP290-B436 | + | GUUCUGUCCUCAGUAAA | 17 | upstream |
| | | (SEQ ID NO: 503) | | |
| CEP290-B444 | + | GGAUAGGACAGAGGACA | 17 | upstream |
| | | (SEQ ID NO: 488) | | |
| CEP290-B445 | + | GAUGAAAAAUACUCUUU | 17 | upstream |
| | | (SEQ ID NO: 477) | | |
| CEP290-B459 | − | GAACUCUAUACCUUUUACUG | 20 | upstream |
| | | (SEQ ID NO: 466) | | |
| CEP290-B465 | + | GUAACAUAAUCACCUCUCUU | 20 | upstream |
| | | (SEQ ID NO: 496) | | |
| CEP290-B473 | + | GAAAGAUGAAAAAUACUCUU | 20 | upstream |
| | | (SEQ ID NO: 462) | | |
| CEP290-B528 | + | GUAACAUAAUCACCUCUCUU | 20 | upstream |
| | | (SEQ ID NO: 496) | | |

[0904] Table 4D provides targeting domains for break-induced deletion of genomic sequence including the mutation at the LCA10 target position in the CEP290 gene selected according to the fourth tier parameters. The targeting domains are within 400 bp upstream of an Alu repeat or 700 bp downstream of the mutation, and do not start with G. It is contemplated herein that the targeting domain hybridizes to the target domain through complementary base pairing. Any of the targeting domains in the table can be used with a S. pyogenes Cas9 molecule that generates a double stranded break (Cas9 nuclease) or a single-stranded break (Cas9 nickase).

TABLE 4D

| | | | Target | |
|---|---|---|---|---|
| | DNA | | Site | |
| gRNA Name | Strand | Targeting Domain | Length | |
| CEP290-B233 | + | AAGGCGGGGAGUCACAU | 17 | downstream |
| | | (SEQ ID NO: 636) | | |
| CEP290-B175 | + | UAAGGCGGGGAGUCACA | 17 | downstream |
| | | (SEQ ID NO: 637) | | |
| CEP290-B280 | + | UGAACUCUGUGCCAAAC | 17 | downstream |
| | | (SEQ ID NO: 638) | | |
| CEP290-B92 | + | CUAAGACACUGCCAAUA | 17 | downstream |
| | | (SEQ ID NO: 597) | | |
| CEP290-B268 | + | UUUACCCUUCAGGUAAC | 17 | downstream |
| | | (SEQ ID NO: 639) | | |
| CEP290-B154 | + | UGACACCACAUGCACUG | 17 | downstream |
| | | (SEQ ID NO: 640) | | |
| CEP290-B44 | + | ACUAAGACACUGCCAAU | 17 | downstream |
| | | (SEQ ID NO: 603) | | |
| CEP290-B231 | + | UUGCUCUAGAUGACAUG | 17 | downstream |
| | | (SEQ ID NO: 641) | | |
| CEP290-B242 | + | UGACAGUUUUUAAGGCG | 17 | downstream |
| | | (SEQ ID NO: 642) | | |
| CEP290-B226 | − | UGUCAAAUAUGGUGCUU | 17 | downstream |
| | | (SEQ ID NO: 643) | | |
| CEP290-B159 | + | AGUCACAUGGGAGUCAC | 17 | downstream |
| | | (SEQ ID NO: 644) | | |
| CEP290-B222 | − | AUGAGAGUGAUUAGUGG | 17 | downstream |
| | | (SEQ ID NO: 645) | | |
| CEP290-B274 | + | UGACAUGAGGUAAGUAG | 17 | downstream |
| | | (SEQ ID NO: 646) | | |
| CEP290-B68 | − | UACAUGAGAGUGAUUAG | 17 | downstream |
| | | (SEQ ID NO: 647) | | |
| CEP290-B212 | + | UAAGGAGGAUGUAAGAC | 17 | downstream |
| | | (SEQ ID NO: 648) | | |
| CEP290-B270 | + | CUUGACUUUUACCCUUC | 17 | downstream |
| | | (SEQ ID NO: 649) | | |
| CEP290-B96 | + | UCACUGAGCAAAACAAC | 17 | downstream |
| | | (SEQ ID NO: 650) | | |
| CEP290-B104 | + | AGACUUAUAUUCCAUUA | 17 | downstream |
| | | (SEQ ID NO: 651) | | |
| CEP290-B122 | + | CAUGGGAGUCACAGGGU | 17 | downstream |
| | | (SEQ ID NO: 652) | | |
| CEP290-B229 | + | UAGAAUGAUCAUUCUUG | 17 | downstream |
| | | (SEQ ID NO: 653) | | |
| CEP290-B99 | + | UUGACAGUUUUUAAGGC | 17 | downstream |
| | | (SEQ ID NO: 654) | | |
| CEP290-B7 | − | AAACUGUCAAAAGCUAC | 17 | downstream |
| | | (SEQ ID NO: 655) | | |
| CEP290-B41 | + | UCAUUCUUGUGGCAGUA | 17 | downstream |
| | | (SEQ ID NO: 2780) | | |
| CEP290-B37 | + | AUGACAUGAGGUAAGUA | 17 | downstream |
| | | (SEQ ID NO: 656) | | |
| CEP290-B97 | − | UGUUUCAAAACUUGUUC | 17 | downstream |
| | | (SEQ ID NO: 657) | | |
| CEP290-B173 | − | AUAUCUGUCUUCCUUAA | 17 | downstream |
| | | (SEQ ID NO: 658) | | |
| CEP290-B136 | + | UGAACAAGUUUUGAAAC | 17 | downstream |
| | | (SEQ ID NO: 659) | | |
| CEP290-B71 | − | UUCUGCAUCUUAUACAU | 17 | downstream |
| | | (SEQ ID NO: 660) | | |
| CEP290-B172 | − | AUAAGUCUUUUGAUAUA | 17 | downstream |
| | | (SEQ ID NO: 661) | | |
| CEP290-B238 | + | UUUGACAGUUUUUAAGG | 17 | downstream |
| | | (SEQ ID NO: 662) | | |
| CEP290-B148 | − | UGCUCUUUUCUAUAUAU | 17 | downstream |
| | | (SEQ ID NO: 663) | | |
| CEP290-B208 | + | AGACUGGAGAUAGAGAC | 17 | downstream |
| | | (SEQ ID NO: 664) | | |
| CEP290-B53 | + | CAUAAGAAAGAACACUG | 17 | downstream |
| | | (SEQ ID NO: 665) | | |
| CEP290-B166 | + | UUCUUGUGGCAGUAAGG | 17 | downstream |
| | | (SEQ ID NO: 666) | | |
| CEP290-B247 | − | AAGCAUACUUUUUUUAA | 17 | downstream |
| | | (SEQ ID NO: 667) | | |
| CEP290-B245 | + | CAACUGGAAGAGAGAAA | 17 | downstream |
| | | (SEQ ID NO: 668) | | |
| CEP290-B167 | + | UAUGCUUAAGAAAAAAA | 17 | downstream |
| | | (SEQ ID NO: 669) | | |
| CEP290-B171 | − | UUUUAUUAUCUUUAUUG | 17 | downstream |
| | | (SEQ ID NO: 670) | | |
| CEP290-B140 | + | CUAGAUGACAUGAGGUAAGU | 20 | downstream |
| | | (SEQ ID NO: 671) | | |
| CEP290-B147 | + | UUUUAAGGCGGGGAGUCACA | 20 | downstream |
| | | (SEQ ID NO: 672) | | |
| CEP290-B253 | + | AAGACACUGCCAAUAGGGAU | 20 | downstream |
| | | (SEQ ID NO: 600) | | |
| CEP290-B73 | − | UCCUGUUUCAAAACUUGUUC | 20 | downstream |
| | | (SEQ ID NO: 673) | | |
| CEP290-B206 | − | UGUGUUGAGUAUCUCCUGUU | 20 | downstream |
| | | (SEQ ID NO: 674) | | |
| CEP290-B57 | + | CUCUUGCUCUAGAUGACAUG | 20 | downstream |
| | | (SEQ ID NO: 675) | | |
| CEP290-B82 | + | CAGUAAGGAGGAUGUAAGAC | 20 | downstream |
| | | (SEQ ID NO: 676) | | |
| CEP290-B265 | + | AGAUGACAUGAGGUAAGUAG | 20 | downstream |
| | | (SEQ ID NO: 677) | | |
| CEP290-B105 | + | AAUUCACUGAGCAAAACAAC | 20 | downstream |
| | | (SEQ ID NO: 678) | | |
| CEP290-B239 | + | UCACAUGGGAGUCACAGGGU | 20 | downstream |
| | | (SEQ ID NO: 679) | | |
| CEP290-B180 | + | UAGAUGACAUGAGGUAAGUA | 20 | downstream |
| | | (SEQ ID NO: 680) | | |
| CEP290-B103 | + | UUUUGACAGUUUUUAAGGCG | 20 | downstream |
| | | (SEQ ID NO: 681) | | |
| CEP290-B254 | − | UAAUACAUGAGAGUGAUUAG | 20 | downstream |
| | | (SEQ ID NO: 682) | | |
| CEP290-B134 | − | UAGUUCUGCAUCUUAUACAU | 20 | downstream |
| | | (SEQ ID NO: 683) | | |
| CEP290-B151 | + | AAACUAAGACACUGCCAAUA | 20 | downstream |
| | | (SEQ ID NO: 609) | | |
| CEP290-B196 | + | AAAACUAAGACACUGCCAAU | 20 | downstream |
| | | (SEQ ID NO: 610) | | |
| CEP290-B2 | − | UAAAAACUGUCAAAAGCUAC | 20 | downstream |
| | | (SEQ ID NO: 506) | | |
| CEP290-B240 | + | CUUUUGACAGUUUUUAAGGC | 20 | downstream |
| | | (SEQ ID NO: 684) | | |
| CEP290-B116 | + | AAAAGACUUAUAUUCCAUUA | 20 | downstream |
| | | (SEQ ID NO: 685) | | |
| CEP290-B39 | + | AUACAUAAGAAAGAACACUG | 20 | downstream |
| | | (SEQ ID NO: 686) | | |
| CEP290-B91 | − | AAUAUAAGUCUUUUGAUAUA | 20 | downstream |
| | | (SEQ ID NO: 687) | | |
| CEP290-B126 | + | UGAUCAUUCUUGUGGCAGUA | 20 | downstream |
| | | (SEQ ID NO: 688) | | |
| CEP290-B202 | − | UACAUAUCUGUCUUCCUUAA | 20 | downstream |
| | | (SEQ ID NO: 689) | | |
| CEP290-B152 | − | CUUAAGCAUACUUUUUUUAA | 20 | downstream |
| | | (SEQ ID NO: 690) | | |
| CEP290-B77 | + | AAACAACUGGAAGAGAGAAA | 20 | downstream |
| | | (SEQ ID NO: 691) | | |
| CEP290-B145 | + | UCAUUCUUGUGGCAGUAAGG | 20 | downstream |
| | | (SEQ ID NO: 692) | | |
| CEP290-B72 | + | AAGUAUGCUUAAGAAAAAAA | 20 | downstream |
| | | (SEQ ID NO: 693) | | |
| CEP290-B221 | − | AUUUUUUAUUAUCUUUAUUG | 20 | downstream |
| | | (SEQ ID NO: 694) | | |
| CEP290-B424 | + | CUAGGACUUUCUAAUGC | 17 | upstream |
| | | (SEQ ID NO: 695) | | |
| CEP290-B425 | − | AUCUAAGAUCCUUUCAC | 17 | upstream |
| | | (SEQ ID NO: 696) | | |
| CEP290-B426 | + | UUAUCACCACACUAAAU | 17 | upstream |
| | | (SEQ ID NO: 697) | | |
| CEP290-B427 | − | AGCUCAAAAGCUUUUGC | 17 | upstream |
| | | (SEQ ID NO: 698) | | |
| CEP290-B428 | − | UGUUCUGAGUAGCUUUC | 17 | upstream |
| | | (SEQ ID NO: 699) | | |
| CEP290-B429 | + | ACUUUCUAAUGCUGGAG | 17 | upstream |
| | | (SEQ ID NO: 700) | | |
| CEP290-B430 | − | CUCUAUACCUUUUACUG | 17 | upstream |
| | | (SEQ ID NO: 701) | | |
| CEP290-B431 | + | CAAGAUGUCUCUUGCCU | 17 | upstream |
| | | (SEQ ID NO: 702) | | |
| CEP290-B432 | − | AUUAUGCCUAUUUAGUG | 17 | upstream |
| | | (SEQ ID NO: 703) | | |
| CEP290-B433 | + | AUGACUCAUAAUUUAGU | 17 | upstream |
| | | (SEQ ID NO: 704) | | |
| CEP290-B434 | − | UAGAGGCUUAUGGAUUU | 17 | upstream |
| | | (SEQ ID NO: 705) | | |
| CEP290-B435 | + | UAUUCUACUCCUGUGAA | 17 | upstream |
| | | (SEQ ID NO: 706) | | |
| CEP290-B437 | + | CUAAUGCUGGAGAGGAU | 17 | upstream |
| | | (SEQ ID NO: 707) | | |
| CEP290-B438 | − | AGGCAAGAGACAUCUUG | 17 | upstream |
| | | (SEQ ID NO: 708) | | |
| CEP290-B439 | + | AGCCUCUAUUUCUGAUG | 17 | upstream |
| | | (SEQ ID NO: 709) | | |
| CEP290-B440 | − | CAGCAUUAGAAAGUCCU | 17 | upstream |
| | | (SEQ ID NO: 710) | | |
| CEP290-B441 | − | CUGCUUUUGCCAAAGAG | 17 | upstream |
| | | (SEQ ID NO: 711) | | |
| CEP290-B442 | + | ACAUAAUCACCUCUCUU | 17 | upstream |
| | | (SEQ ID NO: 712) | | |
| CEP290-B443 | − | UCAGAAAUAGAGGCUUA | 17 | upstream |
| | | (SEQ ID NO: 713) | | |
| CEP290-B446 | − | UUCCUCAUCAGAAAUAG | 17 | upstream |
| | | (SEQ ID NO: 714) | | |
| CEP290-B447 | + | ACAGAGGACAUGGAGAA | 17 | upstream |
| | | (SEQ ID NO: 715) | | |
| CEP290-B448 | + | UGGAGAGGAUAGGACAG | 17 | upstream |
| | | (SEQ ID NO: 716) | | |
| CEP290-B449 | + | AGGAAGAUGAACAAAUC | 17 | upstream |
| | | (SEQ ID NO: 717) | | |
| CEP290-B450 | + | AGAUGAAAAAUACUCUU | 17 | upstream |
| | | (SEQ ID NO: 718) | | |
| CEP290-B455 | + | AGGACUUUCUAAUGCUGGAG | 20 | upstream |
| | | (SEQ ID NO: 719) | | |
| CEP290-B456 | − | AUUAGCUCAAAAGCUUUUGC | 20 | upstream |
| | | (SEQ ID NO: 633) | | |
| CEP290-B457 | − | CUCCAGCAUUAGAAAGUCCU | 20 | upstream |
| | | (SEQ ID NO: 720) | | |
| CEP290-B458 | + | AACAUGACUCAUAAUUUAGU | 20 | upstream |
| | | (SEQ ID NO: 721) | | |
| CEP290-B460 | − | AUCUUCCUCAUCAGAAAUAG | 20 | upstream |
| | | (SEQ ID NO: 722) | | |
| CEP290-B461 | + | AUAAGCCUCUAUUUCUGAUG | 20 | upstream |
| | | (SEQ ID NO: 723) | | |
| CEP290-B462 | + | UCUUAUUCUACUCCUGUGAA | 20 | upstream |
| | | (SEQ ID NO: 724) | | |
| CEP290-B463 | − | CUGCUGCUUUUGCCAAAGAG | 20 | upstream |
| | | (SEQ ID NO: 725) | | |
| CEP290-B464 | + | UUUCUAAUGCUGGAGAGGAU | 20 | upstream |
| | | (SEQ ID NO: 726) | | |
| CEP290-B466 | + | AAAUUAUCACCACACUAAAU | 20 | upstream |
| | | (SEQ ID NO: 727) | | |
| CEP290-B467 | + | CUUGUUCUGUCCUCAGUAAA | 20 | upstream |
| | | (SEQ ID NO: 728) | | |
| CEP290-B468 | − | AAAAUUAUGCCUAUUUAGUG | 20 | upstream |
| | | (SEQ ID NO: 729) | | |
| CEP290-B469 | − | UCAUCAGAAAUAGAGGCUUA | 20 | upstream |
| | | (SEQ ID NO: 730) | | |
| CEP290-B470 | − | AAAUAGAGGCUUAUGGAUUU | 20 | upstream |
| | | (SEQ ID NO: 731) | | |
| CEP290-B471 | + | UGCUGGAGAGGAUAGGACAG | 20 | upstream |
| | | (SEQ ID NO: 732) | | |
| CEP290-B472 | + | AUGAGGAAGAUGAACAAAUC | 20 | upstream |
| | | (SEQ ID NO: 733) | | |
| CEP290-B474 | − | CUUAUCUAAGAUCCUUUCAC | 20 | upstream |
| | | (SEQ ID NO: 734) | | |
| CEP290-B475 | + | AGAGGAUAGGACAGAGGACA | 20 | upstream |
| | | (SEQ ID NO: 735) | | |
| CEP290-B476 | + | AGGACAGAGGACAUGGAGAA | 20 | upstream |
| | | (SEQ ID NO: 736) | | |
| CEP290-B477 | + | AAAGAUGAAAAAUACUCUUU | 20 | upstream |
| | | (SEQ ID NO: 737) | | |
| CEP290-B495 | − | AGCUCAAAAGCUUUUGC | 17 | upstream |
| | | (SEQ ID NO: 698) | | |
| CEP290-B529 | − | UGUUCUGAGUAGCUUUC | 17 | upstream |
| | | (SEQ ID NO: 699) | | |
| CEP290-B513 | + | AUGACUCAUAAUUUAGU | 17 | upstream |
| | | (SEQ ID NO: 704) | | |
| CEP290-B490 | + | UAUUCUACUCCUGUGAA | 17 | upstream |
| | | (SEQ ID NO: 706) | | |
| CEP290-B485 | − | CUGCUUUUGCCAAAGAG | 17 | upstream |
| | | (SEQ ID NO: 711) | | |
| CEP290-B492 | + | ACAUAAUCACCUCUCUU | 17 | upstream |
| | | (SEQ ID NO: 712) | | |
| CEP290-B506 | + | AACAUGACUCAUAAUUUAGU | 20 | upstream |
| | | (SEQ ID NO: 721) | | |
| CEP290-B500 | + | UCUUAUUCUACUCCUGUGAA | 20 | upstream |
| | | (SEQ ID NO: 724) | | |
| CEP290-B521 | − | CUGCUGCUUUUGCCAAAGAG | 20 | upstream |
| | | (SEQ ID NO: 725) | | |

[0905] Table 5A provides targeting domains for break-induced deletion of genomic sequence including the mutation at the LCA10 target position in the CEP290 gene selected according to the first tier parameters. The targeting domains are within 400 bp upstream of an Alu repeat or 700 bp downstream of the mutation, have good orthogonality, and start with G. It is contemplated herein that the targeting domain hybridizes to the target domain through complementary base pairing. Any of the targeting domains in the table can be used with a S. aureus Cas9 molecule that generates a double stranded break (Cas9 nuclease) or a single-stranded break (Cas9 nickase).

TABLE 5A

| | | | | Position |
|---|---|---|---|---|
| | | | Target | relative |
| | DNA | | Site | to |
| gRNA Name | Strand | Targeting Domain | Length | mutation |
| CEP290- | + | GAAUCCUGAAAGCUACU | 17 | upstream |
| B1008 | | (SEQ ID NO: 510) | | |

[0906] Table 5B provides targeting domains for break-induced deletion of genomic sequence including the mutation at the LCA10 target position in the CEP290 gene selected according to the second tier parameters. The targeting domains are within 400 bp upstream of an Alu repeat or 700 bp downstream of the mutation, have good orthogonality, and do not start with G. It is contemplated herein that the targeting domain hybridizes to the target domain through complementary base pairing. Any of the targeting domains in the table can be used with a S. aureus Cas9 molecule that generates a double stranded break (Cas9 nuclease) or a single-stranded break (Cas9 nickase).

TABLE 5B

| | | | Target | Position |
|---|---|---|---|---|
| | DNA | | Site | relative to |
| gRNA Name | Strand | Targeting Domain | Length | mutation |
| CEP290-B1009 | − | CCUACUUACCUCAUGUCAUC | 20 | downstream |
| | | (SEQ ID NO: 747) | | |
| CEP290-B1010 | + | CUAUGAGCCAGCAAAAGCUU | 20 | upstream |
| | | (SEQ ID NO: 748) | | |
| CEP290-B1011 | − | ACGUUGUUCUGAGUAGCUUU | 20 | upstream |
| | | (SEQ ID NO: 749) | | |
| CEP290-B1012 | − | CAUAGAGACACAUUCAGUAA | 20 | upstream |
| | | (SEQ ID NO: 750) | | |
| CEP290-B1013 | − | ACUUACCUCAUGUCAUC | 17 | downstream |
| | | (SEQ ID NO: 751) | | |
| CEP290-B1014 | + | UGAGCCAGCAAAAGCUU | 17 | upstream |
| | | (SEQ ID NO: 752) | | |
| CEP290-B1015 | − | UUGUUCUGAGUAGCUUU | 17 | upstream |
| | | (SEQ ID NO: 753) | | |
| CEP290-B1016 | − | AGAGACACAUUCAGUAA | 17 | upstream |
| | | (SEQ ID NO: 754) | | |
| CEP290-B1017 | + | UUUAAGGCGGGGAGUCACAU | 20 | downstream |
| | | (SEQ ID NO: 619) | | |
| CEP290-B1018 | − | CAAAAGCUACCGGUUACCUG | 20 | downstream |
| | | (SEQ ID NO: 755) | | |
| CEP290-B1019 | + | UUUUAAGGCGGGGAGUCACA | 20 | downstream |
| | | (SEQ ID NO: 672) | | |
| CEP290-B1020 | − | UGUCAAAAGCUACCGGUUAC | 20 | downstream |
| | | (SEQ ID NO: 757) | | |
| CEP290-B1021 | + | AAGGCGGGGAGUCACAU | 17 | downstream |
| | | (SEQ ID NO: 636) | | |
| CEP290-B1022 | − | AAGCUACCGGUUACCUG | 17 | downstream |
| | | (SEQ ID NO: 758) | | |
| CEP290-B1023 | + | UAAGGCGGGGAGUCACA | 17 | downstream |
| | | (SEQ ID NO: 637) | | |
| CEP290-B1024 | − | CAAAAGCUACCGGUUAC | 17 | downstream |
| | | (SEQ ID NO: 759) | | |
| CEP290-B1025 | + | UAGGAAUCCUGAAAGCUACU | 20 | upstream |
| | | (SEQ ID NO: 760) | | |
| CEP290-B1026 | + | CAGAACAACGUUUUCAUUUA | 20 | upstream |
| | | (SEQ ID NO: 761) | | |
| CEP290-B1027 | − | CAAAAGCUUUUGCUGGCUCA | 20 | upstream |
| | | (SEQ ID NO: 762) | | |
| CEP290-B1028 | + | AGCAAAAGCUUUUGAGCUAA | 20 | upstream |
| | | (SEQ ID NO: 763) | | |
| CEP290-B1029 | + | AUCUUAUUCUACUCCUGUGA | 20 | upstream |
| | | (SEQ ID NO: 764) | | |
| CEP290-B1030 | + | AACAACGUUUUCAUUUA | 17 | upstream |
| | | (SEQ ID NO: 765) | | |
| CEP290-B1031 | − | AAGCUUUUGCUGGCUCA | 17 | upstream |
| | | (SEQ ID NO: 766) | | |
| CEP290-B1032 | + | AAAAGCUUUUGAGCUAA | 17 | upstream |
| | | (SEQ ID NO: 767) | | |
| CEP290-B1033 | + | UUAUUCUACUCCUGUGA | 17 | upstream |
| | | (SEQ ID NO: 768) | | |

[0907] Table 5C provides targeting domains for break-induced deletion of genomic sequence including the mutation at the LCA10 target position in the CEP290 gene selected according to the third tier parameters. The targeting domains are within 400 bp upstream of an Alu repeat or 700 bp downstream of the mutation, and start with G. It is contemplated herein that the targeting domain hybridizes to the target domain through complementary base pairing. Any of the targeting domains in the table can be used with a S. aureus Cas9 molecule that generates a double stranded break (Cas9 nuclease) or a single-stranded break (Cas9 nickase).

TABLE 5C

| | | | Target | Position |
|---|---|---|---|---|
| | DNA | | Site | relative to |
| gRNA Name | Strand | Targeting Domain | Length | mutation |
| CEP290-B1034 | + | GAAACAGGAAUAGAAAUUCA | 20 | downstream |
| | | (SEQ ID NO: 769) | | |
| CEP290-B1035 | + | GAAAGAUGAAAAAUACUCUU | 20 | upstream |
| | | (SEQ ID NO: 462) | | |
| CEP290-B1036 | − | GAAAUAGAGGCUUAUGGAUU | 20 | upstream |
| | | (SEQ ID NO: 547) | | |
| CEP290-B1037 | − | GAAUAUAAGUCUUUUGAUAU | 20 | downstream |
| | | (SEQ ID NO: 770) | | |
| CEP290-B1038 | + | GAGAAAUGGUUCCCUAUAUA | 20 | downstream |
| | | (SEQ ID NO: 771) | | |
| CEP290-B1039 | + | GAGAGGAUAGGACAGAGGAC | 20 | upstream |
| | | (SEQ ID NO: 772) | | |
| CEP290-B1040 | + | GAUGAGGAAGAUGAACAAAU | 20 | upstream |
| | | (SEQ ID NO: 773) | | |
| CEP290-B1041 | + | GAUGCAGAACUAGUGUAGAC | 20 | downstream |
| | | (SEQ ID NO: 460) | | |
| CEP290-B1042 | − | GAUUUGUUCAUCUUCCUCAU | 20 | upstream |
| | | (SEQ ID NO: 774) | | |
| CEP290-B1043 | + | GCAGUAAGGAGGAUGUAAGA | 20 | downstream |
| | | (SEQ ID NO: 775) | | |
| CEP290-B1044 | + | GCCUGAACAAGUUUUGAAAC | 20 | downstream |
| | | (SEQ ID NO: 480) | | |
| CEP290-B1045 | + | GCUUGAACUCUGUGCCAAAC | 20 | downstream |
| | | (SEQ ID NO: 461) | | |
| CEP290-B1046 | − | GCUUUCUGCUGCUUUUGCCA | 20 | upstream |
| | | (SEQ ID NO: 776) | | |
| CEP290-B1047 | − | GCUUUCUGCUGCUUUUGCCA | 20 | upstream |
| | | (SEQ ID NO: 776) | | |
| CEP290-B1048 | + | GCUUUUGACAGUUUUUAAGG | 20 | downstream |
| | | (SEQ ID NO: 482) | | |
| CEP290-B1049 | + | GGAAAGAUGAAAAAUACUCU | 20 | upstream |
| | | (SEQ ID NO: 778) | | |
| CEP290-B1050 | + | GGAGGAUGUAAGACUGGAGA | 20 | downstream |
| | | (SEQ ID NO: 779) | | |
| CEP290-B1051 | + | GGGGAGUCACAUGGGAGUCA | 20 | downstream |
| | | (SEQ ID NO: 573) | | |
| CEP290-B1052 | − | GGUGAUUAUGUUACUUUUUA | 20 | upstream |
| | | (SEQ ID NO: 780) | | |
| CEP290-B1053 | − | GGUGAUUAUGUUACUUUUUA | 20 | upstream |
| | | (SEQ ID NO: 780) | | |
| CEP290-B1054 | + | GUAAGACUGGAGAUAGAGAC | 20 | downstream |
| | | (SEQ ID NO: 497) | | |
| CEP290-B1055 | + | GUCACAUGGGAGUCACAGGG | 20 | downstream |
| | | (SEQ ID NO: 586) | | |
| CEP290-B1056 | − | GUGGUGUCAAAUAUGGUGCU | 20 | downstream |
| | | (SEQ ID NO: 782) | | |
| CEP290-B1057 | + | GAAAAAAAAGGUAAUGC | 17 | downstream |
| | | (SEQ ID NO: 783) | | |
| CEP290-B1058 | + | GAAAAGAGCACGUACAA | 17 | downstream |
| | | (SEQ ID NO: 784 | | |
| CEP290-B1059 | + | GAAUCCUGAAAGCUACU | 17 | upstream |
| | | (SEQ ID NO: 510) | | |
| CEP290-B1060 | − | GAAUGAUCAUUCUAAAC | 17 | downstream |
| | | (SEQ ID NO: 785) | | |
| CEP290-B1061 | + | GACAGAGGACAUGGAGA | 17 | upstream |
| | | (SEQ ID NO: 786) | | |
| CEP290-B1062 | + | GACUUUCUAAUGCUGGA | 17 | upstream |
| | | (SEQ ID NO: 787) | | |
| CEP290-B1063 | − | GAGAGUGAUUAGUGGUG | 17 | downstream |
| | | (SEQ ID NO: 788) | | |
| CEP290-B1064 | + | GAGCAAAACAACUGGAA | 17 | downstream |
| | | (SEQ ID NO: 789) | | |
| CEP290-B1065 | + | GAGGAAGAUGAACAAAU | 17 | upstream |
| | | (SEQ ID NO: 790) | | |
| CEP290-B1066 | + | GAGUCACAUGGGAGUCA | 17 | downstream |
| | | (SEQ ID NO: 791) | | |
| CEP290-B1067 | + | GAUCUUAUUCUACUCCU | 17 | upstream |
| | | (SEQ ID NO: 792) | | |
| CEP290-B1068 | + | GAUCUUAUUCUACUCCU | 17 | upstream |
| | | (SEQ ID NO: 792) | | |
| CEP290-B1069 | + | GAUGAAAAAUACUCUUU | 17 | upstream |
| | | (SEQ ID NO: 477) | | |
| CEP290-B1070 | + | GAUGACAUGAGGUAAGU | 17 | downstream |
| | | (SEQ ID NO: 478) | | |
| CEP290-B1071 | − | GAUUAUGUUACUUUUUA | 17 | upstream |
| | | (SEQ ID NO: 793) | | |
| CEP290-B1072 | − | GAUUAUGUUACUUUUUA | 17 | upstream |
| | | (SEQ ID NO: 793) | | |
| CEP290-B1073 | + | GCAAAACAACUGGAAGA | 17 | downstream |
| | | (SEQ ID NO: 794) | | |
| CEP290-B1074 | + | GCAGAACUAGUGUAGAC | 17 | downstream |
| | | (SEQ ID NO: 458) | | |
| CEP290-B1075 | − | GCUCUUUUCUAUAUAUA | 17 | downstream |
| | | (SEQ ID NO: 481) | | |
| CEP290-B1076 | + | GGAUAGGACAGAGGACA | 17 | upstream |
| | | (SEQ ID NO: 488) | | |
| CEP290-B1077 | + | GGAUGUAAGACUGGAGA | 17 | downstream |
| | | (SEQ ID NO: 795) | | |
| CEP290-B1078 | + | GUAAGGAGGAUGUAAGA | 17 | downstream |
| | | (SEQ ID NO: 796) | | |
| CEP290-B1079 | − | GUAUCUCCUGUUUGGCA | 17 | downstream |
| | | (SEQ ID NO: 797) | | |
| CEP290-B1080 | − | GUCAUCUAGAGCAAGAG | 17 | downstream |
| | | (SEQ ID NO: 798) | | |
| CEP290-B1081 | + | GUCCUCAGUAAAAGGUA | 17 | upstream |
| | | (SEQ ID NO: 799) | | |
| CEP290-B1082 | + | GUGAAAGGAUCUUAGAU | 17 | upstream |
| | | (SEQ ID NO: 800) | | |
| CEP290-B1083 | − | GUGCUCUUUUCUAUAUA | 17 | downstream |
| | | (SEQ ID NO: 801) | | |
| CEP290-B1084 | − | GUGUCAAAUAUGGUGCU | 17 | downstream |
| | | (SEQ ID NO: 802) | | |
| CEP290-B1085 | + | GUUCCCUAUAUAUAGAA | 17 | downstream |
| | | (SEQ ID NO: 803) | | |

[0908] Table 5D provides targeting domains for break-induced deletion of genomic sequence including the mutation at the LCA10 target position in the CEP290 gene selected according to the fourth tier parameters. The targeting domains are within 400 bp upstream of an Alu repeat or 700 bp downstream of the mutation, and do not start with G. It is contemplated herein that the targeting domain hybridizes to the target domain through complementary base pairing. Any of the targeting domains in the table can be used with a S. aureus Cas9 molecule that generates a double stranded break (Cas9 nuclease) or a single-stranded break (Cas9 nickase).

TABLE 5D

| | | | Target | Position |
|---|---|---|---|---|
| | DNA | | Site | relative to |
| gRNA Name | Strand | Targeting Domain | Length | mutation |
| CEP290-B1086 | + | AAAACUAAGACACUGCCAAU | 20 | downstream |
| | | (SEQ ID NO: 610) | | |
| CEP290-B1087 | + | AAAAGACUUAUAUUCCAUUA | 20 | downstream |
| | | (SEQ ID NO: 685) | | |
| CEP290-B1088 | + | AAACAUGACUCAUAAUUUAG | 20 | upstream |
| | | (SEQ ID NO: 805) | | |
| CEP290-B1089 | + | AAACAUGACUCAUAAUUUAG | 20 | upstream |
| | | (SEQ ID NO: 805) | | |
| CEP290-B1090 | + | AAAGAUGAAAAAUACUCUUU | 20 | upstream |
| | | (SEQ ID NO: 737) | | |
| CEP290-B1091 | + | AAAUUCACUGAGCAAAACAA | 20 | downstream |
| | | (SEQ ID NO: 808) | | |
| CEP290-B1092 | + | AACAAGUUUUGAAACAGGAA | 20 | downstream |
| | | (SEQ ID NO: 809) | | |
| CEP290-B1093 | + | AACAGGAGAUACUCAACACA | 20 | downstream |
| | | (SEQ ID NO: 810) | | |
| CEP290-B1094 | + | AACAUGACUCAUAAUUUAGU | 20 | upstream |
| | | (SEQ ID NO: 721) | | |
| CEP290-B1095 | + | AACAUGACUCAUAAUUUAGU | 20 | upstream |
| | | (SEQ ID NO: 721) | | |
| CEP290-B1096 | − | AAUAUAAGUCUUUUGAUAUA | 20 | downstream |
| | | (SEQ ID NO: 687) | | |
| CEP290-B1097 | + | AAUCACUCUCAUGUAUUAGC | 20 | downstream |
| | | (SEQ ID NO: 814) | | |
| CEP290-B1098 | + | AAUUCACUGAGCAAAACAAC | 20 | downstream |
| | | (SEQ ID NO: 678) | | |
| CEP290-B1099 | + | ACAAAAGAACAUACAUAAGA | 20 | downstream |
| | | (SEQ ID NO: 816) | | |
| CEP290-B1100 | + | ACGUACAAAAGAACAUACAU | 20 | downstream |
| | | (SEQ ID NO: 817) | | |
| CEP290-B1101 | − | ACGUGCUCUUUUCUAUAUAU | 20 | downstream |
| | | (SEQ ID NO: 622) | | |
| CEP290-B1102 | − | ACGUUGUUCUGAGUAGCUUU | 20 | upstream |
| | | (SEQ ID NO: 749) | | |
| CEP290-B1103 | + | ACUGAGCAAAACAACUGGAA | 20 | downstream |
| | | (SEQ ID NO: 819) | | |
| CEP290-B1104 | + | AGAGGAUAGGACAGAGGACA | 20 | upstream |
| | | (SEQ ID NO: 735) | | |
| CEP290-B1105 | + | AGAUGCAGAACUAGUGUAGA | 20 | downstream |
| | | (SEQ ID NO: 821) | | |
| CEP290-B1106 | + | AGCAAAAGCUUUUGAGCUAA | 20 | upstream |
| | | (SEQ ID NO: 763) | | |
| CEP290-B1107 | − | AGCAUUAGAAAGUCCUAGGC | 20 | upstream |
| | | (SEQ ID NO: 823) | | |
| CEP290-B1108 | + | AGCUUGAACUCUGUGCCAAA | 20 | downstream |
| | | (SEQ ID NO: 824) | | |
| CEP290-B1109 | + | AGCUUUUGACAGUUUUUAAG | 20 | downstream |
| | | (SEQ ID NO: 825) | | |
| CEP290-B1110 | + | AGGACAGAGGACAUGGAGAA | 20 | upstream |
| | | (SEQ ID NO: 736) | | |
| CEP290-B1111 | + | AGGAUAGGACAGAGGACAUG | 20 | upstream |
| | | (SEQ ID NO: 827) | | |
| CEP290-B1112 | + | AGGUAAUGCCUGAACAAGUU | 20 | downstream |
| | | (SEQ ID NO: 828) | | |
| CEP290-B1113 | + | AUAAGAAAGAACACUGUGGU | 20 | downstream |
| | | (SEQ ID NO: 829) | | |
| CEP290-B1114 | + | AUAAGCCUCUAUUUCUGAUG | 20 | upstream |
| | | (SEQ ID NO: 723) | | |
| CEP290-B1115 | − | AUACAUGAGAGUGAUUAGUG | 20 | downstream |
| | | (SEQ ID NO: 831) | | |
| CEP290-B1116 | + | AUAGAAAAGAGCACGUACAA | 20 | downstream |
| | | (SEQ ID NO: 832) | | |
| CEP290-B1117 | + | AUCAUUCUUGUGGCAGUAAG | 20 | downstream |
| | | (SEQ ID NO: 833) | | |
| CEP290-B1118 | + | AUCUUAUUCUACUCCUGUGA | 20 | upstream |
| | | (SEQ ID NO: 764) | | |
| CEP290-B1119 | − | AUCUUGUGGAUAAUGUAUCA | 20 | upstream |
| | | (SEQ ID NO: 835) | | |
| CEP290-B1120 | + | AUGAGGAAGAUGAACAAAUC | 20 | upstream |
| | | (SEQ ID NO: 733) | | |
| CEP290-B1121 | + | AUGAUCAUUCUUGUGGCAGU | 20 | downstream |
| | | (SEQ ID NO: 837) | | |
| CEP290-B1122 | + | AUGCUGGAGAGGAUAGGACA | 20 | upstream |
| | | (SEQ ID NO: 838) | | |
| CEP290-B1123 | + | AUGGUUCCCUAUAUAUAGAA | 20 | downstream |
| | | (SEQ ID NO: 839) | | |
| CEP290-B1124 | − | AUUUAAUUUGUUUCUGUGUG | 20 | downstream |
| | | (SEQ ID NO: 840) | | |
| CEP290-B1125 | + | CAAAACCUAUGUAUAAGAUG | 20 | downstream |
| | | (SEQ ID NO: 841) | | |
| CEP290-B1126 | + | CAAAAGACUUAUAUUCCAUU | 20 | downstream |
| | | (SEQ ID NO: 842) | | |
| CEP290-B1127 | − | CAAAAGCUUUUGCUGGCUCA | 20 | upstream |
| | | (SEQ ID NO: 762) | | |
| CEP290-B1128 | − | CAAGAAUGAUCAUUCUAAAC | 20 | downstream |
| | | (SEQ ID NO: 844) | | |
| CEP290-B1129 | − | CACAGAGUUCAAGCUAAUAC | 20 | downstream |
| | | (SEQ ID NO: 845) | | |
| CEP290-B1130 | + | CACAGGGUAGGAUUCAUGUU | 20 | downstream |
| | | (SEQ ID NO: 846) | | |
| CEP290-B1131 | + | CACUGCCAAUAGGGAUAGGU | 20 | downstream |
| | | (SEQ ID NO: 613) | | |
| CEP290-B1132 | + | CAGAACAACGUUUUCAUUUA | 20 | upstream |
| | | (SEQ ID NO: 761) | | |
| CEP290-B1133 | − | CAGAGUUCAAGCUAAUACAU | 20 | downstream |
| | | (SEQ ID NO: 848) | | |
| CEP290-B1134 | − | CAGUAAAUGAAAACGUUGUU | 20 | upstream |
| | | (SEQ ID NO: 849) | | |
| CEP290-B1135 | − | CAGUAAAUGAAAACGUUGUU | 20 | upstream |
| | | (SEQ ID NO: 849) | | |
| CEP290-B1136 | + | CAGUAAGGAGGAUGUAAGAC | 20 | downstream |
| | | (SEQ ID NO: 676) | | |
| CEP290-B1137 | + | CAUAAGCCUCUAUUUCUGAU | 20 | upstream |
| | | (SEQ ID NO: 851) | | |
| CEP290-B1138 | − | CAUAGAGACACAUUCAGUAA | 20 | upstream |
| | | (SEQ ID NO: 750) | | |
| CEP290-B1139 | + | CAUCUCUUGCUCUAGAUGAC | 20 | downstream |
| | | (SEQ ID NO: 853) | | |
| CEP290-B1140 | − | CAUGAGAGUGAUUAGUGGUG | 20 | downstream |
| | | (SEQ ID NO: 854) | | |
| CEP290-B1141 | − | CAUGUCAUCUAGAGCAAGAG | 20 | downstream |
| | | (SEQ ID NO: 855) | | |
| CEP290-B1142 | + | CAUUUACUGAAUGUGUCUCU | 20 | upstream |
| | | (SEQ ID NO: 856) | | |
| CEP290-B1143 | + | CAUUUACUGAAUGUGUCUCU | 20 | upstream |
| | | (SEQ ID NO: 856) | | |
| CEP290-B1144 | + | CCAUUAAAAAAAGUAUGCUU | 20 | downstream |
| | | (SEQ ID NO: 857) | | |
| CEP290-B1145 | + | CCUAGGACUUUCUAAUGCUG | 20 | upstream |
| | | (SEQ ID NO: 858) | | |
| CEP290-B1146 | + | CCUCUCUUUGGCAAAAGCAG | 20 | upstream |
| | | (SEQ ID NO: 859) | | |
| CEP290-B1147 | + | CCUCUCUUUGGCAAAAGCAG | 20 | upstream |
| | | (SEQ ID NO: 859) | | |
| CEP290-B1148 | + | CCUGUGAAAGGAUCUUAGAU | 20 | upstream |
| | | (SEQ ID NO: 860) | | |
| CEP290-B1149 | − | CGUGCUCUUUUCUAUAUAUA | 20 | downstream |
| | | (SEQ ID NO: 624) | | |
| CEP290-B1150 | − | CUAAGAUCCUUUCACAGGAG | 20 | upstream |
| | | (SEQ ID NO: 861) | | |
| CEP290-B1151 | + | CUAGAUGACAUGAGGUAAGU | 20 | downstream |
| | | (SEQ ID NO: 671) | | |
| CEP290-B1152 | + | CUAUGAGCCAGCAAAAGCUU | 20 | upstream |
| | | (SEQ ID NO: 748) | | |
| CEP290-B1153 | + | CUCAUAAUUUAGUAGGAAUC | 20 | upstream |
| | | (SEQ ID NO: 864) | | |
| CEP290-B1154 | + | CUCAUAAUUUAGUAGGAAUC | 20 | upstream |
| | | (SEQ ID NO: 864) | | |
| CEP290-B1155 | − | CUCAUCAGAAAUAGAGGCUU | 20 | upstream |
| | | (SEQ ID NO: 865) | | |
| CEP290-B1156 | + | CUCUAUUUCUGAUGAGGAAG | 20 | upstream |
| | | (SEQ ID NO: 866) | | |
| CEP290-B1157 | − | CUUAAGCAUACUUUUUUUAA | 20 | downstream |
| | | (SEQ ID NO: 690) | | |
| CEP290-B1158 | − | CUUAUCUAAGAUCCUUUCAC | 20 | upstream |
| | | (SEQ ID NO: 734) | | |
| CEP290-B1159 | + | CUUUCUAAUGCUGGAGAGGA | 20 | upstream |
| | | (SEQ ID NO: 869) | | |
| CEP290-B1160 | + | CUUUUGACAGUUUUUAAGGC | 20 | downstream |
| | | (SEQ ID NO: 684) | | |
| CEP290-B1161 | + | UAAAACUAAGACACUGCCAA | 20 | downstream |
| | | (SEQ ID NO: 871) | | |
| CEP290-B1162 | + | UAAGAAAAAAAAGGUAAUGC | 20 | downstream |
| | | (SEQ ID NO: 872) | | |
| CEP290-B1163 | + | UAAUGCUGGAGAGGAUAGGA | 20 | upstream |
| | | (SEQ ID NO: 873) | | |
| CEP290-B1164 | − | UACAUAUCUGUCUUCCUUAA | 20 | downstream |
| | | (SEQ ID NO: 689) | | |
| CEP290-B1165 | − | UACAUCCUCCUUACUGCCAC | 20 | downstream |
| | | (SEQ ID NO: 875) | | |
| CEP290-B1166 | − | UACAUGAGAGUGAUUAGUGG | 20 | downstream |
| | | (SEQ ID NO: 628) | | |
| CEP290-B1167 | − | UACCUCAUGUCAUCUAGAGC | 20 | downstream |
| | | (SEQ ID NO: 876) | | |
| CEP290-B1168 | − | UACGUGCUCUUUUCUAUAUA | 20 | downstream |
| | | (SEQ ID NO: 877) | | |
| CEP290-B1169 | − | UAGAGCAAGAGAUGAACUAG | 20 | downstream |
| | | (SEQ ID NO: 878) | | |
| CEP290-B1170 | + | UAGAUGACAUGAGGUAAGUA | 20 | downstream |
| | | (SEQ ID NO: 680) | | |
| CEP290-B1171 | + | UAGGAAUCCUGAAAGCUACU | 20 | upstream |
| | | (SEQ ID NO: 760) | | |
| CEP290-B1172 | + | UAGGACAGAGGACAUGGAGA | 20 | upstream |
| | | (SEQ ID NO: 881) | | |
| CEP290-B1173 | + | UAGGACUUUCUAAUGCUGGA | 20 | upstream |
| | | (SEQ ID NO: 882) | | |
| CEP290-B1174 | + | UCACUGAGCAAAACAACUGG | 20 | downstream |
| | | (SEQ ID NO: 883) | | |
| CEP290-B1175 | − | UCAUGUUUAUCAAUAUUAUU | 20 | upstream |
| | | (SEQ ID NO: 884) | | |
| CEP290-B1176 | − | UCAUGUUUAUCAAUAUUAUU | 20 | upstream |
| | | (SEQ ID NO: 884) | | |
| CEP290-B1177 | + | UCCACAAGAUGUCUCUUGCC | 20 | upstream |
| | | (SEQ ID NO: 885) | | |
| CEP290-B1178 | + | UCCAUAAGCCUCUAUUUCUG | 20 | upstream |
| | | (SEQ ID NO: 886) | | |
| CEP290-B1179 | − | UCCUAGGCAAGAGACAUCUU | 20 | upstream |
| | | (SEQ ID NO: 887) | | |
| CEP290-B1180 | + | UCUAGAUGACAUGAGGUAAG | 20 | downstream |
| | | (SEQ ID NO: 888) | | |
| CEP290-B1181 | − | UCUAUACCUUUUACUGAGGA | 20 | upstream |
| | | (SEQ ID NO: 889) | | |
| CEP290-B1182 | + | UCUGUCCUCAGUAAAAGGUA | 20 | upstream |
| | | (SEQ ID NO: 890) | | |
| CEP290-B1183 | − | UCUUAAGCAUACUUUUUUUA | 20 | downstream |
| | | (SEQ ID NO: 891) | | |
| CEP290-B1184 | − | UCUUAUCUAAGAUCCUUUCA | 20 | upstream |
| | | (SEQ ID NO: 892) | | |
| CEP290-B1185 | − | UCUUCCAGUUGUUUUGCUCA | 20 | downstream |
| | | (SEQ ID NO: 893) | | |
| CEP290-B1186 | + | UGAGCAAAACAACUGGAAGA | 20 | downstream |
| | | (SEQ ID NO: 894) | | |
| CEP290-B1187 | − | UGAGUAUCUCCUGUUUGGCA | 20 | downstream |
| | | (SEQ ID NO: 895) | | |
| CEP290-B1188 | + | UGAUCAUUCUUGUGGCAGUA | 20 | downstream |
| | | (SEQ ID NO: 688) | | |
| CEP290-B1189 | + | UGCCUAGGACUUUCUAAUGC | 20 | upstream |
| | | (SEQ ID NO: 632) | | |
| CEP290-B1190 | + | UGCCUGAACAAGUUUUGAAA | 20 | downstream |
| | | (SEQ ID NO: 897) | | |
| CEP290-B1191 | − | UGGUGUCAAAUAUGGUGCUU | 20 | downstream |
| | | (SEQ ID NO: 625) | | |
| CEP290-B1192 | + | UGUAAGACUGGAGAUAGAGA | 20 | downstream |
| | | (SEQ ID NO: 898) | | |
| CEP290-B1193 | − | UGUCCUAUCCUCUCCAGCAU | 20 | upstream |
| | | (SEQ ID NO: 899) | | |
| CEP290-B1194 | − | UUAACGUUAUCAUUUUCCCA | 20 | upstream |
| | | (SEQ ID NO: 900) | | |
| CEP290-B1195 | − | UUACAUAUCUGUCUUCCUUA | 20 | downstream |
| | | (SEQ ID NO: 901) | | |
| CEP290-B1196 | + | UUAGAUCUUAUUCUACUCCU | 20 | upstream |
| | | (SEQ ID NO: 902) | | |
| CEP290-B1197 | + | UUAGAUCUUAUUCUACUCCU | 20 | upstream |
| | | (SEQ ID NO: 902) | | |
| CEP290-B1198 | − | UUCAGGAUUCCUACUAAAUU | 20 | upstream |
| | | (SEQ ID NO: 904) | | |
| CEP290-B1199 | − | UUCAGGAUUCCUACUAAAUU | 20 | upstream |
| | | (SEQ ID NO: 904) | | |
| CEP290-B1200 | − | UUCAUCUUCCUCAUCAGAAA | 20 | upstream |
| | | (SEQ ID NO: 905) | | |
| CEP290-B1201 | + | UUGCCUAGGACUUUCUAAUG | 20 | upstream |
| | | (SEQ ID NO: 906) | | |
| CEP290-B1202 | − | UUUCUGCUGCUUUUGCCAAA | 20 | upstream |
| | | (SEQ ID NO: 907) | | |
| CEP290-B1203 | − | UUUCUGCUGCUUUUGCCAAA | 20 | upstream |
| | | (SEQ ID NO: 907) | | |
| CEP290-B1204 | + | UUUUGACAGUUUUUAAGGCG | 20 | downstream |
| | | (SEQ ID NO: 681) | | |
| CEP290-B1205 | + | UUUUUAAGGCGGGGAGUCAC | 20 | downstream |
| | | (SEQ ID NO: 909) | | |
| CEP290-B1206 | + | AAAAGCUUUUGAGCUAA | 17 | upstream |
| | | (SEQ ID NO: 767) | | |
| CEP290-B1207 | + | AAAGAACAUACAUAAGA | 17 | downstream |
| | | (SEQ ID NO: 911) | | |
| CEP290-B1208 | + | AAAUGGUUCCCUAUAUA | 17 | downstream |
| | | (SEQ ID NO: 912) | | |
| CEP290-B1209 | + | AACAACGUUUUCAUUUA | 17 | upstream |
| | | (SEQ ID NO: 765) | | |
| CEP290-B1210 | + | AACCUAUGUAUAAGAUG | 17 | downstream |
| | | (SEQ ID NO: 914) | | |
| CEP290-B1211 | + | AACUAAGACACUGCCAA | 17 | downstream |
| | | (SEQ ID NO: 915) | | |
| CEP290-B1212 | + | AAGACUGGAGAUAGAGA | 17 | downstream |
| | | (SEQ ID NO: 916) | | |
| CEP290-B1213 | + | AAGACUUAUAUUCCAUU | 17 | downstream |
| | | (SEQ ID NO: 917) | | |
| CEP290-B1214 | + | AAGAUGAAAAAUACUCU | 17 | upstream |
| | | (SEQ ID NO: 918) | | |
| CEP290-B1215 | − | AAGCAUACUUUUUUUAA | 17 | downstream |
| | | (SEQ ID NO: 667) | | |
| CEP290-B1216 | + | AAGCCUCUAUUUCUGAU | 17 | upstream |
| | | (SEQ ID NO: 920) | | |
| CEP290-B1217 | − | AAGCUUUUGCUGGCUCA | 17 | upstream |
| | | (SEQ ID NO: 766) | | |
| CEP290-B1218 | + | AAGUUUUGAAACAGGAA | 17 | downstream |
| | | (SEQ ID NO: 922) | | |
| CEP290-B1219 | + | ACAAGAUGUCUCUUGCC | 17 | upstream |
| | | (SEQ ID NO: 923) | | |
| CEP290-B1220 | + | ACAGAGGACAUGGAGAA | 17 | upstream |
| | | (SEQ ID NO: 715) | | |
| CEP290-B1221 | + | ACAGGAAUAGAAAUUCA | 17 | downstream |
| | | (SEQ ID NO: 925) | | |
| CEP290-B1222 | + | ACAUGGGAGUCACAGGG | 17 | downstream |
| | | (SEQ ID NO: 926) | | |
| CEP290-B1223 | − | ACGUUAUCAUUUUCCCA | 17 | upstream |
| | | (SEQ ID NO: 927) | | |
| CEP290-B1224 | + | ACUAAGACACUGCCAAU | 17 | downstream |
| | | (SEQ ID NO: 603) | | |
| CEP290-B1225 | + | AGAAAGAACACUGUGGU | 17 | downstream |
| | | (SEQ ID NO: 928) | | |
| CEP290-B1226 | + | AGACUGGAGAUAGAGAC | 17 | downstream |
| | | (SEQ ID NO: 664) | | |
| CEP290-B1227 | + | AGACUUAUAUUCCAUUA | 17 | downstream |
| | | (SEQ ID NO: 651) | | |
| CEP290-B1228 | − | AGAGACACAUUCAGUAA | 17 | upstream |
| | | (SEQ ID NO: 754) | | |
| CEP290-B1229 | − | AGAGUUCAAGCUAAUAC | 17 | downstream |
| | | (SEQ ID NO: 931) | | |
| CEP290-B1230 | − | AGAUCCUUUCACAGGAG | 17 | upstream |
| | | (SEQ ID NO: 932) | | |
| CEP290-B1231 | + | AGAUGAAAAAUACUCUU | 17 | upstream |
| | | (SEQ ID NO: 718) | | |
| CEP290-B1232 | + | AGAUGACAUGAGGUAAG | 17 | downstream |
| | | (SEQ ID NO: 934) | | |
| CEP290-B1233 | − | AGCAAGAGAUGAACUAG | 17 | downstream |
| | | (SEQ ID NO: 935) | | |
| CEP290-B1234 | + | AGCCUCUAUUUCUGAUG | 17 | upstream |
| | | (SEQ ID NO: 709) | | |
| CEP290-B1235 | + | AGGAAGAUGAACAAAUC | 17 | upstream |
| | | (SEQ ID NO: 717) | | |
| CEP290-B1236 | + | AGGACUUUCUAAUGCUG | 17 | upstream |
| | | (SEQ ID NO: 938) | | |
| CEP290-B1237 | + | AGGAGAUACUCAACACA | 17 | downstream |
| | | (SEQ ID NO: 939) | | |
| CEP290-B1238 | + | AGGAUAGGACAGAGGAC | 17 | upstream |
| | | (SEQ ID NO: 940) | | |
| CEP290-B1239 | − | AGGAUUCCUACUAAAUU | 17 | upstream |
| | | (SEQ ID NO: 941) | | |
| CEP290-B1240 | − | AGGAUUCCUACUAAAUU | 17 | upstream |
| | | (SEQ ID NO: 941) | | |
| CEP290-B1241 | + | AGGGUAGGAUUCAUGUU | 17 | downstream |
| | | (SEQ ID NO: 942) | | |
| CEP290-B1242 | − | AGUUCAAGCUAAUACAU | 17 | downstream |
| | | (SEQ ID NO: 943) | | |
| CEP290-B1243 | + | AUAAGCCUCUAUUUCUG | 17 | upstream |
| | | (SEQ ID NO: 944) | | |
| CEP290-B1244 | − | AUAAGUCUUUUGAUAUA | 17 | downstream |
| | | (SEQ ID NO: 661) | | |
| CEP290-B1245 | + | AUAAUUUAGUAGGAAUC | 17 | upstream |
| | | (SEQ ID NO: 946) | | |
| CEP290-B1246 | + | AUAAUUUAGUAGGAAUC | 17 | upstream |
| | | (SEQ ID NO: 946) | | |
| CEP290-B1247 | − | AUACCUUUUACUGAGGA | 17 | upstream |
| | | (SEQ ID NO: 947) | | |
| CEP290-B1248 | − | AUAGAGGCUUAUGGAUU | 17 | upstream |
| | | (SEQ ID NO: 948) | | |
| CEP290-B1249 | + | AUAGGACAGAGGACAUG | 17 | upstream |
| | | (SEQ ID NO: 949) | | |
| CEP290-B1250 | − | AUAUCUGUCUUCCUUAA | 17 | downstream |
| | | (SEQ ID NO: 658) | | |
| CEP290-B1251 | − | AUCAGAAAUAGAGGCUU | 17 | upstream |
| | | (SEQ ID NO: 951) | | |
| CEP290-B1252 | + | AUCAUUCUUGUGGCAGU | 17 | downstream |
| | | (SEQ ID NO: 952) | | |
| CEP290-B1253 | − | AUCCUCCUUACUGCCAC (SEQ | 17 | downstream |
| | | ID NO: 953) | | |
| CEP290-B1254 | − | AUCUAAGAUCCUUUCAC | 17 | upstream |
| | | (SEQ ID NO: 696) | | |
| CEP290-B1255 | − | AUCUUCCUCAUCAGAAA | 17 | upstream |
| | | (SEQ ID NO: 955) | | |
| CEP290-B1256 | + | AUGACAUGAGGUAAGUA | 17 | downstream |
| | | (SEQ ID NO: 656) | | |
| CEP290-B1257 | + | AUGACUCAUAAUUUAGU | 17 | upstream |
| | | (SEQ ID NO: 704) | | |
| CEP290-B1258 | + | AUGACUCAUAAUUUAGU | 17 | upstream |
| | | (SEQ ID NO: 704) | | |
| CEP290-B1259 | − | AUGAGAGUGAUUAGUGG | 17 | downstream |
| | | (SEQ ID NO: 645) | | |
| CEP290-B1260 | − | AUUAGAAAGUCCUAGGC | 17 | upstream |
| | | (SEQ ID NO: 957) | | |
| CEP290-B1261 | + | AUUCUUGUGGCAGUAAG | 17 | downstream |
| | | (SEQ ID NO: 958) | | |
| CEP290-B1262 | + | CACUCUCAUGUAUUAGC | 17 | downstream |
| | | (SEQ ID NO: 959) | | |
| CEP290-B1263 | − | CAUAUCUGUCUUCCUUA | 17 | downstream |
| | | (SEQ ID NO: 960) | | |
| CEP290-B1264 | + | CAUGACUCAUAAUUUAG | 17 | upstream |
| | | (SEQ ID NO: 961) | | |
| CEP290-B1265 | + | CAUGACUCAUAAUUUAG | 17 | upstream |
| | | (SEQ ID NO: 961) | | |
| CEP290-B1266 | − | CAUGAGAGUGAUUAGUG | 17 | downstream |
| | | (SEQ ID NO: 962) | | |
| CEP290-B1267 | + | CCUAGGACUUUCUAAUG | 17 | upstream |
| | | (SEQ ID NO: 963) | | |
| CEP290-B1268 | − | CCUAUCCUCUCCAGCAU (SEQ | 17 | upstream |
| | | ID NO: 964) | | |
| CEP290-B1269 | + | CUAGGACUUUCUAAUGC | 17 | upstream |
| | | (SEQ ID NO: 695) | | |
| CEP290-B1270 | − | CUCAUGUCAUCUAGAGC | 17 | downstream |
| | | (SEQ ID NO: 966) | | |
| CEP290-B1271 | + | CUCUUGCUCUAGAUGAC | 17 | downstream |
| | | (SEQ ID NO: 967) | | |
| CEP290-B1272 | + | CUCUUUGGCAAAAGCAG | 17 | upstream |
| | | (SEQ ID NO: 968) | | |
| CEP290-B1273 | + | CUCUUUGGCAAAAGCAG | 17 | upstream |
| | | (SEQ ID NO: 968) | | |
| CEP290-B1274 | + | CUGAACAAGUUUUGAAA | 17 | downstream |
| | | (SEQ ID NO: 970) | | |
| CEP290-B1275 | + | CUGAGCAAAACAACUGG | 17 | downstream |
| | | (SEQ ID NO: 971) | | |
| CEP290-B1276 | − | CUGCUGCUUUUGCCAAA | 17 | upstream |
| | | (SEQ ID NO: 972) | | |
| CEP290-B1277 | − | CUGCUGCUUUUGCCAAA | 17 | upstream |
| | | (SEQ ID NO: 972) | | |
| CEP290-B1278 | + | CUGGAGAGGAUAGGACA | 17 | upstream |
| | | (SEQ ID NO: 973) | | |
| CEP290-B1279 | − | UAAAUGAAAACGUUGUU | 17 | upstream |
| | | (SEQ ID NO: 974) | | |
| CEP290-B1280 | − | UAAAUGAAAACGUUGUU | 17 | upstream |
| | | (SEQ ID NO: 974) | | |
| CEP290-B1281 | − | UAAGCAUACUUUUUUUA | 17 | downstream |
| | | (SEQ ID NO: 975) | | |
| CEP290-B1282 | + | UAAGGAGGAUGUAAGAC | 17 | downstream |
| | | (SEQ ID NO: 648) | | |
| CEP290-B1283 | + | UAAUGCCUGAACAAGUU | 17 | downstream |
| | | (SEQ ID NO: 976) | | |
| CEP290-B1284 | − | UAAUUUGUUUCUGUGUG | 17 | downstream |
| | | (SEQ ID NO: 977) | | |
| CEP290-B1285 | + | UACAAAAGAACAUACAU | 17 | downstream |
| | | (SEQ ID NO: 978) | | |
| CEP290-B1286 | − | UAGGCAAGAGACAUCUU | 17 | upstream |
| | | (SEQ ID NO: 979) | | |
| CEP290-B1287 | − | UAUAAGUCUUUUGAUAU | 17 | downstream |
| | | (SEQ ID NO: 980) | | |
| CEP290-B1288 | − | UAUCUAAGAUCCUUUCA | 17 | upstream |
| | | (SEQ ID NO: 981) | | |
| CEP290-B1289 | + | UAUUUCUGAUGAGGAAG | 17 | upstream |
| | | (SEQ ID NO: 982) | | |
| CEP290-B1290 | + | UCACUGAGCAAAACAAC | 17 | downstream |
| | | (SEQ ID NO: 650) | | |
| CEP290-B1291 | + | UCAUUCUUGUGGCAGUA | 17 | downstream |
| | | (SEQ ID NO: 2780) | | |
| CEP290-B1292 | − | UCCAGUUGUUUUGCUCA | 17 | downstream |
| | | (SEQ ID NO: 983) | | |
| CEP290-B1293 | + | UCUAAUGCUGGAGAGGA | 17 | upstream |
| | | (SEQ ID NO: 984) | | |
| CEP290-B1294 | + | UGAACAAGUUUUGAAAC | 17 | downstream |
| | | (SEQ ID NO: 659) | | |
| CEP290-B1295 | + | UGAACUCUGUGCCAAAC | 17 | downstream |
| | | (SEQ ID NO: 638) | | |
| CEP290-B1296 | + | UGACAGUUUUUAAGGCG | 17 | downstream |
| | | (SEQ ID NO: 642) | | |
| CEP290-B1297 | + | UGAGCCAGCAAAAGCUU | 17 | upstream |
| | | (SEQ ID NO: 752) | | |
| CEP290-B1298 | + | UGCAGAACUAGUGUAGA | 17 | downstream |
| | | (SEQ ID NO: 987) | | |
| CEP290-B1299 | + | UGCCAAUAGGGAUAGGU | 17 | downstream |
| | | (SEQ ID NO: 614) | | |
| CEP290-B1300 | − | UGCUCUUUUCUAUAUAU | 17 | downstream |
| | | (SEQ ID NO: 663) | | |
| CEP290-B1301 | + | UGCUGGAGAGGAUAGGA | 17 | upstream |
| | | (SEQ ID NO: 989) | | |
| CEP290-B1302 | − | UGUCAAAUAUGGUGCUU | 17 | downstream |
| | | (SEQ ID NO: 643) | | |
| CEP290-B1303 | − | UGUUUAUCAAUAUUAUU | 17 | upstream |
| | | (SEQ ID NO: 990) | | |
| CEP290-B1304 | − | UGUUUAUCAAUAUUAUU | 17 | upstream |
| | | (SEQ ID NO: 990) | | |
| CEP290-B1305 | + | UUAAAAAAAGUAUGCUU | 17 | downstream |
| | | (SEQ ID NO: 991) | | |
| CEP290-B1306 | + | UUAAGGCGGGGAGUCAC | 17 | downstream |
| | | (SEQ ID NO: 992) | | |
| CEP290-B1307 | + | UUACUGAAUGUGUCUCU | 17 | upstream |
| | | (SEQ ID NO: 993) | | |
| CEP290-B1308 | + | UUACUGAAUGUGUCUCU | 17 | upstream |
| | | (SEQ ID NO: 993) | | |
| CEP290-B1309 | + | UUAUUCUACUCCUGUGA | 17 | upstream |
| | | (SEQ ID NO: 768) | | |
| CEP290-B1310 | + | UUCACUGAGCAAAACAA | 17 | downstream |
| | | (SEQ ID NO: 995) | | |
| CEP290-B1311 | − | UUCUGCUGCUUUUGCCA | 17 | upstream |
| | | (SEQ ID NO: 996) | | |
| CEP290-B1312 | − | UUCUGCUGCUUUUGCCA | 17 | upstream |
| | | (SEQ ID NO: 996) | | |
| CEP290-B1313 | + | UUGAACUCUGUGCCAAA | 17 | downstream |
| | | (SEQ ID NO: 997) | | |
| CEP290-B1314 | + | UUGACAGUUUUUAAGGC | 17 | downstream |
| | | (SEQ ID NO: 654) | | |
| CEP290-B1315 | − | UUGUGGAUAAUGUAUCA | 17 | upstream |
| | | (SEQ ID NO: 999) | | |
| CEP290-B1316 | − | UUGUUCAUCUUCCUCAU | 17 | upstream |
| | | (SEQ ID NO: 1000) | | |
| CEP290-B1317 | − | UUGUUCUGAGUAGCUUU | 17 | upstream |
| | | (SEQ ID NO: 753) | | |
| CEP290-B1318 | + | UUUGACAGUUUUUAAGG | 17 | downstream |
| | | (SEQ ID NO: 662) | | |
| CEP290-B1319 | + | UUUUGACAGUUUUUAAG | 17 | downstream |
| | | (SEQ ID NO: 1003) | | |

[0909] Table 6A provides targeting domains for break-induced deletion of genomic sequence including the mutation at the LCA10 target position in the CEP290 gene selected according to the first tier parameters. The targeting domains are within 400 bp upstream of an Alu repeat or 700 bp downstream of the mutation, have good orthogonality, and start with G. It is contemplated herein that the targeting domain hybridizes to the target domain through complementary base pairing. Any of the targeting domains in the table can be used with a N. meningitidis Cas9 molecule that generates a double stranded break (Cas9 nuclease) or a single-stranded break (Cas9 nickase).

TABLE 6A

| | | | Target | Position |
|---|---|---|---|---|
| | DNA | | Site | relative to |
| gRNA Name | Strand | Targeting Domain | Length | mutation |
| CEP290-B65 | − | GAGUUCAAGCUAAUACAUGA | 20 | downstream |
| | | (SEQ ID NO: 589) | | |
| CEP290-B296 | − | GUUGUUCUGAGUAGCUU | 17 | upstream |
| | | (SEQ ID NO: 590) | | |
| CEP290-B308 | + | GGCAAAAGCAGCAGAAAGCA | 20 | upstream |
| | | (SEQ ID NO: 591) | | |
| CEP290-B536 | − | GUUGUUCUGAGUAGCUU | 17 | upstream |
| | | (SEQ ID NO: 590) | | |
| CEP290-B482 | + | GGCAAAAGCAGCAGAAAGCA | 20 | upstream |
| | | (SEQ ID NO: 591) | | |

[0910] Table 6B provides targeting domains for break-induced deletion of genomic sequence including the mutation at the LCA10 target position in the CEP290 gene selected according to the second tier parameters. The targeting domains are within 400 bp upstream of an Alu repeat or 700 bp downstream of the mutation, have good orthogonality, and do not start with G. It is contemplated herein that the targeting domain hybridizes to the target domain through complementary base pairing. Any of the targeting domains in the table can be used with a N. meningitidis Cas9 molecule that generates a double stranded break (Cas9 nuclease) or a single-stranded break (Cas9 nickase).

TABLE 6B

| | | | Target | Position |
|---|---|---|---|---|
| | DNA | | Site | relative to |
| gRNA Name | Strand | Targeting Domain | Length | mutation |
| CEP290-B235 | − | UUCAAGCUAAUACAUGA | 17 | downstream |
| | | (SEQ ID NO: 1004) | | |
| CEP290-B109 | + | CACAUGGGAGUCACAGG | 17 | downstream |
| | | (SEQ ID NO: 1005) | | |
| CEP290-B129 | + | AGUCACAUGGGAGUCACAGG | 20 | downstream |
| | | (SEQ ID NO: 1006) | | |
| CEP290-B295 | − | AAUAGAGGCUUAUGGAU | 17 | upstream |
| | | (SEQ ID NO: 1007) | | |
| CEP290-B297 | − | CUGAGGACAGAACAAGC | 17 | upstream |
| | | (SEQ ID NO: 1008) | | |
| CEP290-B298 | − | CAUCAGAAAUAGAGGCU | 17 | upstream |
| | | (SEQ ID NO: 1009) | | |
| CEP290-B299 | − | CUGCUUUUGCCAAAGAG | 17 | upstream |
| | | (SEQ ID NO: 711) | | |
| CEP290-B300 | + | AGCAGAAAGCAAACUGA | 17 | upstream |
| | | (SEQ ID NO: 1011) | | |
| CEP290-B301 | + | AAAAGCAGCAGAAAGCA | 17 | upstream |
| | | (SEQ ID NO: 1012) | | |
| CEP290-B302 | − | UUACUGAGGACAGAACAAGC | 20 | upstream |
| | | (SEQ ID NO: 1013) | | |
| CEP290-B303 | − | AACGUUGUUCUGAGUAGCUU | 20 | upstream |
| | | (SEQ ID NO: 1014) | | |
| CEP290-B304 | − | CUGCUGCUUUUGCCAAAGAG | 20 | upstream |
| | | (SEQ ID NO: 725) | | |
| CEP290-B305 | − | AGAAAUAGAGGCUUAUGGAU | 20 | upstream |
| | | (SEQ ID NO: 1016) | | |
| CEP290-B306 | − | CCUCAUCAGAAAUAGAGGCU | 20 | upstream |
| | | (SEQ ID NO: 1017) | | |
| CEP290-B307 | + | AGCAGCAGAAAGCAAACUGA | 20 | upstream |
| | | (SEQ ID NO: 1018) | | |
| CEP290-B531 | − | CUGCUUUUGCCAAAGAG | 17 | upstream |
| | | (SEQ ID NO: 711) | | |
| CEP290-B522 | + | AGCAGAAAGCAAACUGA | 17 | upstream |
| | | (SEQ ID NO: 1011) | | |
| CEP290-B537 | + | AAAAGCAGCAGAAAGCA | 17 | upstream |
| | | (SEQ ID NO: 1012) | | |
| CEP290-B504 | − | AACGUUGUUCUGAGUAGCUU | 20 | upstream |
| | | (SEQ ID NO: 1014) | | |
| CEP290-B478 | − | CUGCUGCUUUUGCCAAAGAG | 20 | upstream |
| | | (SEQ ID NO: 725) | | |
| CEP290-B526 | + | AGCAGCAGAAAGCAAACUGA | 20 | upstream |
| | | (SEQ ID NO: 1018) | | |

[0911] Table 7A provides targeting domains for introduction of an indel (e.g., mediated by NHEJ) in close proximity to or including the LCA10 target position in the CEP290 gene selected according to the first tier parameters. The targeting domains are within 40 bases of the LCA10 target position, have good orthogonality, start with G and PAM is NNGRRT. It is contemplated herein that in an embodiment the targeting domain hybridizes to the target domain through complementary base pairing. Any of the targeting domains in the table can be used with a S. aureus Cas9 molecule that generates a double stranded break (Cas9 nuclease) or a single-stranded break (Cas9 nickase).

TABLE 7A

| | | | Target |
|---|---|---|---|
| | DNA | | Site |
| gRNA Name | Strand | Targeting Domain | Length |
| CEP290-12 | − | GCACCUGGCCCCAGUUGUAAUU | 22 |
| | | (SEQ ID NO: 398) | |

[0912] Table 7B provides targeting domains for introduction of an indel (e.g., mediated by NHEJ) in close proximity to or including the LCA10 target position in the CEP290 gene selected according to the second tier parameters. The targeting domains are within 40 bases of the LCA10 target position, have good orthogonality, and PAM is NNGRRT. It is contemplated herein that the targeting domain hybridizes to the target domain through complementary base pairing. Any of the targeting domains in the table can be used with a S. aureus Cas9 molecule that generates a double stranded break (Cas9 nuclease) or a single-stranded break (Cas9 nickase).

TABLE 7B

| | | | Target |
|---|---|---|---|
| | DNA | | Site |
| gRNA Name | Strand | Targeting Domain | Length |
| CEP290-35 | + | AAAUAAAACUAAGACACUGCCAAU | 24 |
| | | (SEQ ID NO: 1025) | |
| CEP290-36 | + | AAUAAAACUAAGACACUGCCAAU | 23 |
| | | (SEQ ID NO: 1026) | |
| CEP290-37 | + | AUAAAACUAAGACACUGCCAAU | 22 |
| | | (SEQ ID NO: 1027) | |
| CEP290-38 | + | AAAACUAAGACACUGCCAAU (SEQ | 20 |
| | | ID NO: 610) | |
| CEP290-39 | + | AAACUAAGACACUGCCAAU (SEQ | 19 |
| | | ID NO: 1028) | |
| CEP290-40 | + | AACUAAGACACUGCCAAU (SEQ ID | 18 |
| | | NO: 1029) | |
| CEP290-512 | − | ACCUGGCCCCAGUUGUAAUU (SEQ | 20 |
| | | ID NO: 616) | |
| CEP290-17 | − | CCGCACCUGGCCCCAGUUGUAAUU | 24 |
| | | (SEQ ID NO: 1030) | |
| CEP290-41 | − | CGCACCUGGCCCCAGUUGUAAUU | 23 |
| | | (SEQ ID NO: 1031) | |
| CEP290-42 | − | CACCUGGCCCCAGUUGUAAUU | 21 |
| | | (SEQ ID NO: 1032) | |
| CEP290-513 | − | CCUGGCCCCAGUUGUAAUU (SEQ | 19 |
| | | ID NO: 1033) | |
| CEP290-514 | − | CUGGCCCCAGUUGUAAUU (SEQ ID | 18 |
| | | NO: 1034) | |
| CEP290-43 | + | UAAAACUAAGACACUGCCAAU | 21 |
| | | (SEQ ID NO: 1035) | |

[0913] Table 7C provides targeting domains for introduction of an indel (e.g., mediated by NHEJ) in close proximity to or including the LCA10 target position in the CEP290 gene selected according to the fifth tier parameters. The targeting domains are within 40 bases of the LCA10 target position, and PAM is NNGRRV. It is contemplated herein that the targeting domain hybridizes to the target domain through complementary base pairing. Any of the targeting domains in the table can be used with a S. aureus Cas9 molecule that generates a double stranded break (Cas9 nuclease) or a single-stranded break (Cas9 nickase).

TABLE 7C

| | | | Target |
|---|---|---|---|
| | DNA | | Site |
| gRNA Name | Strand | Targeting Domain | Length |
| CEP290-44 | + | AAAAUAAAACUAAGACACUGCCAA | 24 |
| | | (SEQ ID NO: 1036) | |
| CEP290-45 | + | AAAUAAAACUAAGACACUGCCAA | 23 |
| | | (SEQ ID NO: 1037) | |
| CEP290-46 | + | AAUAAAACUAAGACACUGCCAA | 22 |
| | | (SEQ ID NO: 1038) | |
| CEP290-47 | + | AUAAAACUAAGACACUGCCAA | 21 |
| | | (SEQ ID NO: 1039) | |
| CEP290-48 | + | AAAACUAAGACACUGCCAA (SEQ | 19 |
| | | ID NO: 1040) | |
| CEP290-49 | + | AAACUAAGACACUGCCAA (SEQ ID | 18 |
| | | NO: 1041) | |
| CEP290-16 | + | AAGACACUGCCAAUAGGGAUAGGU | 24 |
| | | (SEQ ID NO: 1042) | |
| CEP290-50 | + | AGACACUGCCAAUAGGGAUAGGU | 23 |
| | | (SEQ ID NO: 1043) | |
| CEP290-51 | + | ACACUGCCAAUAGGGAUAGGU | 21 |
| | | (SEQ ID NO: 1044) | |
| CEP290-510 | + | ACUGCCAAUAGGGAUAGGU (SEQ | 19 |
| | | ID NO: 1045) | |
| CEP290-509 | + | CACUGCCAAUAGGGAUAGGU (SEQ | 20 |
| | | ID NO: 613) | |
| CEP290-511 | + | CUGCCAAUAGGGAUAGGU (SEQ ID | 18 |
| | | NO: 1046) | |
| CEP290-11 | + | GACACUGCCAAUAGGGAUAGGU | 22 |
| | | (SEQ ID NO: 1047) | |
| CEP290-52 | + | UAAAACUAAGACACUGCCAA (SEQ | 20 |
| | | ID NO: 871) | |
| CEP290-13 | + | AUGAGAUACUCACAAUUACAAC | 22 |
| | | (SEQ ID NO: 1049) | |
| CEP290-53 | + | AGAUACUCACAAUUACAAC (SEQ | 19 |
| | | ID NO: 1050) | |
| CEP290-18 | + | GUAUGAGAUACUCACAAUUACAAC | 24 |
| | | (SEQ ID NO: 1051) | |
| CEP290-54 | + | GAGAUACUCACAAUUACAAC (SEQ | 20 |
| | | ID NO: 395) | |
| CEP290-55 | + | GAUACUCACAAUUACAAC (SEQ ID | 18 |
| | | NO: 1052) | |
| CEP290-14 | + | UAUGAGAUACUCACAAUUACAAC | 23 |
| | | (SEQ ID NO: 1053) | |
| CEP290-57 | + | UGAGAUACUCACAAUUACAAC | 21 |
| | | (SEQ ID NO: 1054) | |
| CEP290-58 | + | AUGAGAUAUUCACAAUUACAA | 21 |
| | | (SEQ ID NO: 1055) | |
| CEP290-59 | + | AGAUAUUCACAAUUACAA (SEQ ID | 18 |
| | | NO: 1056) | |
| CEP290-19 | + | GGUAUGAGAUAUUCACAAUUACAA | 24 |
| | | (SEQ ID NO: 1057) | |
| CEP290-61 | + | GUAUGAGAUAUUCACAAUUACAA | 23 |
| | | (SEQ ID NO: 1058) | |
| CEP290-63 | + | GAGAUAUUCACAAUUACAA (SEQ | 19 |
| | | ID NO: 1059) | |
| CEP290-65 | + | UAUGAGAUAUUCACAAUUACAA | 22 |
| | | (SEQ ID NO: 1060) | |
| CEP290-66 | + | UGAGAUAUUCACAAUUACAA (SEQ | 20 |
| | | ID NO: 1061) | |

[0914] Table 7D provides targeting domains for introduction of an indel (e.g., mediated by NHEJ) in close proximity to or including the LCA10 target position in the CEP290 gene that can be used for dual targeting. Any of the targeting domains in the table can be used with a S. aureus Cas9 (nickase) molecule to generate a single stranded break. Exemplary nickase pairs including selecting a targeting domain from Group A and a second targeting domain from Group B. It is contemplated herein that a targeting domain of Group A can be combined with any of the targeting domains of Group B. For example, the CEP290-12 or CEP290-17 can be combined with CEP290-11 or CEP290-16.

TABLE 7D

| Group A | Group B |
|---|---|
| CEP290-12 | CEP290-11 |
| CEP290-17 | CEP290-16 |

[0915] Table 8A provides targeting domains for break-induced deletion of genomic sequence including the mutation at the LCA10 target position in the CEP290 gene selected according to the first tier parameters. The targeting domains are within 1000 bp upstream of an Alu repeat, within 40 bp upstream of mutation, or 1000 bp downstream of the mutation, have good orthogonality, and start with G. It is contemplated herein that the targeting domain hybridizes to the target domain through complementary base pairing. Any of the targeting domains in the table can be used with a S. pyogenes Cas9 molecule that generates a double stranded break (Cas9 nuclease) or a single-stranded break (Cas9 nickase).

TABLE 8A

| | | | Target | Position |
|---|---|---|---|---|
| | DNA | | Site | relative to |
| gRNA Name | Strand | Targeting Domain | Length | mutation |
| CEP290-67 | + | GAAAGAUGAAAAAUACUCUU | 20 | upstream |
| | | (SEQ ID NO: 462) | | |
| CEP290-68 | − | GAAAUAGAUGUAGAUUG | 17 | downstream |
| | | (SEQ ID NO: 463) | | |
| CEP290-70 | − | GAAAUAUUAAGGGCUCUUCC | 20 | upstream |
| | | (SEQ ID NO: 464) | | |
| CEP290-71 | + | GAACAAAAGCCAGGGACCAU | 20 | upstream |
| | | (SEQ ID NO: 465) | | |
| CEP290-72 | − | GAACUCUAUACCUUUUACUG | 20 | upstream |
| | | (SEQ ID NO: 466) | | |
| CEP290-73 | − | GAAGAAUGGAAUAGAUAAUA | 20 | downstream |
| | | (SEQ ID NO: 467) | | |
| CEP290-74 | + | GAAUAGUUUGUUCUGGGUAC | 20 | upstream |
| | | (SEQ ID NO: 468) | | |
| CEP290-75 | − | GAAUGGAAUAGAUAAUA | 17 | downstream |
| | | (SEQ ID NO: 469) | | |
| CEP290-76 | + | GAAUUUACAGAGUGCAUCCA | 20 | upstream |
| | | (SEQ ID NO: 470) | | |
| CEP290-77 | − | GAGAAAAAGGAGCAUGAAAC | 20 | upstream |
| | | (SEQ ID NO: 471) | | |
| CEP290-78 | − | GAGAGCCACAGUGCAUG | 17 | downstream |
| | | (SEQ ID NO: 472) | | |
| CEP290-79 | − | GAGGUAGAAUCAAGAAG | 17 | downstream |
| | | (SEQ ID NO: 473) | | |
| CEP290-80 | + | GAGUGCAUCCAUGGUCC | 17 | upstream |
| | | (SEQ ID NO: 474) | | |
| CEP290-81 | + | GAUAACUACAAAGGGUC | 17 | upstream |
| | | (SEQ ID NO: 475) | | |
| CEP290-82 | + | GAUAGAGACAGGAAUAA | 17 | downstream |
| | | (SEQ ID NO: 476) | | |
| CEP290-83 | + | GAUGAAAAAUACUCUUU | 17 | upstream |
| | | (SEQ ID NO: 477) | | |
| CEP290-84 | + | GAUGACAUGAGGUAAGU | 17 | downstream |
| | | (SEQ ID NO: 478) | | |
| CEP290-85 | + | GAUGCAGAACUAGUGUAGAC | 20 | downstream |
| | | (SEQ ID NO: 460) | | |
| CEP290-86 | + | GCAGAACUAGUGUAGAC | 17 | downstream |
| | | (SEQ ID NO: 458) | | |
| CEP290-87 | − | GCAUGUGGUGUCAAAUA | 17 | downstream |
| | | (SEQ ID NO: 479) | | |
| CEP290-88 | + | GCCUGAACAAGUUUUGAAAC | 20 | downstream |
| | | (SEQ ID NO: 480) | | |
| CEP290-89 | − | GCUACCGGUUACCUGAA | 17 | downstream |
| | | (SEQ ID NO: 457) | | |
| CEP290-90 | − | GCUCUUUUCUAUAUAUA | 17 | downstream |
| | | (SEQ ID NO: 481) | | |
| CEP290-91 | + | GCUUGAACUCUGUGCCAAAC | 20 | downstream |
| | | (SEQ ID NO: 461) | | |
| CEP290-92 | + | GCUUUUGACAGUUUUUAAGG | 20 | downstream |
| | | (SEQ ID NO: 482) | | |
| CEP290-93 | − | GCUUUUGUUCCUUGGAA | 17 | upstream |
| | | (SEQ ID NO: 483) | | |
| CEP290-94 | + | GGAACAAAAGCCAGGGACCA | 20 | upstream |
| | | (SEQ ID NO: 484) | | |
| CEP290-95 | + | GGACUUGACUUUUACCCUUC | 20 | downstream |
| | | (SEQ ID NO: 485) | | |
| CEP290-96 | + | GGAGAAUAGUUUGUUCU | 17 | upstream |
| | | (SEQ ID NO: 486) | | |
| CEP290-97 | + | GGAGUCACAUGGGAGUCACA | 20 | downstream |
| | | (SEQ ID NO: 487) | | |
| CEP290-98 | + | GGAUAGGACAGAGGACA | 17 | upstream |
| | | (SEQ ID NO: 488) | | |
| CEP290-99 | + | GGCUGUAAGAUAACUACAAA | 20 | upstream |
| | | (SEQ ID NO: 489) | | |
| CEP290-100 | + | GGGAGAAUAGUUUGUUC | 17 | upstream |
| | | (SEQ ID NO: 490) | | |
| CEP290-101 | + | GGGAGUCACAUGGGAGUCAC | 20 | downstream |
| | | (SEQ ID NO: 491) | | |
| CEP290-102 | − | GGGCUCUUCCUGGACCA (SEQ | 17 | upstream |
| | | ID NO: 492) | | |
| CEP290-103 | + | GGGUACAGGGGUAAGAGAAA | 20 | upstream |
| | | (SEQ ID NO: 493) | | |
| CEP290-104 | − | GGUCCCUGGCUUUUGUUCCU | 20 | upstream |
| | | (SEQ ID NO: 494) | | |
| CEP290-105 | − | GUAAAGGUUCAUGAGACUAG | 20 | downstream |
| | | (SEQ ID NO: 495) | | |
| CEP290-106 | + | GUAACAUAAUCACCUCUCUU | 20 | upstream |
| | | (SEQ ID NO: 496) | | |
| CEP290-107 | + | GUAAGACUGGAGAUAGAGAC | 20 | downstream |
| | | (SEQ ID NO: 497) | | |
| CEP290-108 | + | GUACAGGGGUAAGAGAA | 17 | upstream |
| | | (SEQ ID NO: 498) | | |
| CEP290-109 | + | GUAGCUUUUGACAGUUUUUA | 20 | downstream |
| | | (SEQ ID NO: 499) | | |
| CEP290-110 | + | GUCACAUGGGAGUCACA | 17 | downstream |
| | | (SEQ ID NO: 500) | | |
| CEP290-111 | − | GUGGAGAGCCACAGUGCAUG | 20 | downstream |
| | | (SEQ ID NO: 501) | | |
| CEP290-112 | − | GUUACAAUCUGUGAAUA | 17 | upstream |
| | | (SEQ ID NO: 502) | | |
| CEP290-113 | + | GUUCUGUCCUCAGUAAA | 17 | upstream |
| | | (SEQ ID NO: 503) | | |
| CEP290-114 | − | GUUGAGUAUCUCCUGUU | 17 | downstream |
| | | (SEQ ID NO: 459) | | |
| CEP290-115 | + | GUUUAGAAUGAUCAUUCUUG | 20 | downstream |
| | | (SEQ ID NO: 504) | | |
| CEP290-116 | + | GUUUGUUCUGGGUACAG | 17 | upstream |
| | | (SEQ ID NO: 505) | | |
| CEP290-117 | − | UAAAAACUGUCAAAAGCUAC | 20 | downstream |
| | | (SEQ ID NO: 506) | | |
| CEP290-118 | + | UAAAAGGUAUAGAGUUCAAG | 20 | upstream |
| | | (SEQ ID NO: 507) | | |
| CEP290-119 | + | UAAAUCAUGCAAGUGACCUA | 20 | upstream |
| | | (SEQ ID NO: 508) | | |
| CEP290-120 | + | UAAGAUAACUACAAAGGGUC | 20 | upstream |
| | | (SEQ ID NO: 509) | | |

[0916] Table 8B provides targeting domains for break-induced deletion of genomic sequence including the mutation at the LCA10 target position in the CEP290 gene selected according to the second tier parameters. The targeting domains are within 1000 bp upstream of an Alu repeat, within 40 bp upstream of mutation, or 1000 bp downstream of the mutation, have good orthogonality, and do not start with G. It is contemplated herein that the targeting domain hybridizes to the target domain through complementary base pairing. Any of the targeting domains in the table can be used with a S. pyogenes Cas9 molecule that generates a double stranded break (Cas9 nuclease) or a single-stranded break (Cas9 nickase).

TABLE 8B

| | | | Target | Position |
|---|---|---|---|---|
| | DNA | | Site | relative to |
| gRNA Name | Strand | Targeting Domain | Length | mutation |
| CEP290-121 | − | AAAAAGGAGCAUGAAAC | 17 | upstream |
| | | (SEQ ID NO: 1062) | | |
| CEP290-122 | + | AAAACUAAGACACUGCCAAU | 20 | downstream |
| | | (SEQ ID NO: 610) | | |
| CEP290-123 | + | AAAAGACUUAUAUUCCAUUA | 20 | downstream |
| | | (SEQ ID NO: 685) | | |
| CEP290-124 | − | AAAAGCUACCGGUUACCUGA | 20 | downstream |
| | | (SEQ ID NO: 621) | | |
| CEP290-125 | − | AAAAUUAUGCCUAUUUAGUG | 20 | upstream |
| | | (SEQ ID NO: 729) | | |
| CEP290-126 | + | AAACAACUGGAAGAGAGAAA | 20 | downstream |
| | | (SEQ ID NO: 691) | | |
| CEP290-127 | + | AAACUAAGACACUGCCAAUA | 20 | downstream |
| | | (SEQ ID NO: 609) | | |
| CEP290-128 | − | AAACUGUCAAAAGCUAC | 17 | downstream |
| | | (SEQ ID NO: 655) | | |
| CEP290-129 | − | AAAGAAAUAGAUGUAGAUUG | 20 | downstream |
| | | (SEQ ID NO: 1066) | | |
| CEP290-130 | + | AAAGAUGAAAAAUACUCUUU | 20 | upstream |
| | | (SEQ ID NO: 737) | | |
| CEP290-131 | − | AAAGCUACCGGUUACCUGAA | 20 | downstream |
| | | (SEQ ID NO: 620) | | |
| CEP290-133 | − | AAAUAGAGGCUUAUGGAUUU | 20 | upstream |
| | | (SEQ ID NO: 731) | | |
| CEP290-134 | + | AAAUUAUCACCACACUAAAU | 20 | upstream |
| | | (SEQ ID NO: 727) | | |
| CEP290-135 | − | AACAAACUAUUCUCCCA (SEQ | 17 | upstream |
| | | ID NO: 1070) | | |
| CEP290-136 | − | AACAGUAGCUGAAAUAUUAA | 20 | upstream |
| | | (SEQ ID NO: 1071) | | |
| CEP290-137 | + | AACAUGACUCAUAAUUUAGU | 20 | upstream |
| | | (SEQ ID NO: 721) | | |
| CEP290-138 | − | AACUAUUCUCCCAUGGUCCC | 20 | upstream |
| | | (SEQ ID NO: 1073) | | |
| CEP290-140 | + | AAGACACUGCCAAUAGGGAU | 20 | downstream |
| | | (SEQ ID NO: 600) | | |
| CEP290-141 | − | AAGGAAAUACAAAAACUGGA | 20 | downstream |
| | | (SEQ ID NO: 1074) | | |
| CEP290-142 | + | AAGGUAUAGAGUUCAAG | 17 | upstream |
| | | (SEQ ID NO: 1075) | | |
| CEP290-143 | − | AAGGUUCAUGAGACUAG | 17 | downstream |
| | | (SEQ ID NO: 1076) | | |
| CEP290-144 | + | AAUAGUUUGUUCUGGGUACA | 20 | upstream |
| | | (SEQ ID NO: 1077) | | |
| CEP290-145 | − | AAUAUAAGUCUUUUGAUAUA | 20 | downstream |
| | | (SEQ ID NO: 687) | | |
| CEP290-146 | − | AAUAUAUUAUCUAUUUAUAG | 20 | upstream |
| | | (SEQ ID NO: 1079) | | |
| CEP290-147 | − | AAUAUUGUAAUCAAAGG | 17 | upstream |
| | | (SEQ ID NO: 1080) | | |
| CEP290-148 | + | AAUAUUUCAGCUACUGU | 17 | upstream |
| | | (SEQ ID NO: 1081) | | |
| CEP290-149 | − | AAUUAUUGUUGCUUUUUGAG | 20 | downstream |
| | | (SEQ ID NO: 1082) | | |
| CEP290-150 | + | AAUUCACUGAGCAAAACAAC | 20 | downstream |
| | | (SEQ ID NO: 678) | | |
| CEP290-151 | + | ACAAAAGCCAGGGACCA | 17 | upstream |
| | | (SEQ ID NO: 1084) | | |
| CEP290-152 | + | ACACUGCCAAUAGGGAU | 17 | downstream |
| | | (SEQ ID NO: 595) | | |
| CEP290-153 | + | ACAGAGUGCAUCCAUGGUCC | 20 | upstream |
| | | (SEQ ID NO: 1085) | | |
| CEP290-154 | + | ACAUAAUCACCUCUCUU (SEQ | 17 | upstream |
| | | ID NO: 712) | | |
| CEP290-155 | − | ACCAGACAUCUAAGAGAAAA | 20 | upstream |
| | | (SEQ ID NO: 1087) | | |
| CEP290-156 | − | ACGUGCUCUUUUCUAUAUAU | 20 | downstream |
| | | (SEQ ID NO: 622) | | |
| CEP290-157 | + | ACUUUCUAAUGCUGGAG | 17 | upstream |
| | | (SEQ ID NO: 700) | | |
| CEP290-158 | + | ACUUUUACCCUUCAGGUAAC | 20 | downstream |
| | | (SEQ ID NO: 626) | | |
| CEP290-159 | − | AGAAUAUUGUAAUCAAAGGA | 20 | upstream |
| | | (SEQ ID NO: 1089) | | |
| CEP290-160 | − | AGACAUCUAAGAGAAAA | 17 | upstream |
| | | (SEQ ID NO: 1090) | | |
| CEP290-161 | + | AGACUUAUAUUCCAUUA | 17 | downstream |
| | | (SEQ ID NO: 651) | | |
| CEP290-162 | + | AGAGGAUAGGACAGAGGACA | 20 | upstream |
| | | (SEQ ID NO: 735) | | |
| CEP290-163 | + | AGAUGACAUGAGGUAAGUAG | 20 | downstream |
| | | (SEQ ID NO: 677) | | |
| CEP290-164 | + | AGAUGUCUGGUUAAAAG | 17 | upstream |
| | | (SEQ ID NO: 1093) | | |
| CEP290-165 | + | AGCCUCUAUUUCUGAUG | 17 | upstream |
| | | (SEQ ID NO: 709) | | |
| CEP290-166 | − | AGCUACCGGUUACCUGA | 17 | downstream |
| | | (SEQ ID NO: 618) | | |
| CEP290-167 | − | AGCUCAAAAGCUUUUGC | 17 | upstream |
| | | (SEQ ID NO: 698) | | |
| CEP290-168 | − | AGGAAAUACAAAAACUGGAU | 20 | downstream |
| | | (SEQ ID NO: 1096) | | |
| CEP290-169 | + | AGGAAGAUGAACAAAUC | 17 | upstream |
| | | (SEQ ID NO: 717) | | |
| CEP290-170 | + | AGGACAGAGGACAUGGAGAA | 20 | upstream |
| | | (SEQ ID NO: 736) | | |
| CEP290-171 | + | AGGACUUUCUAAUGCUGGAG | 20 | upstream |
| | | (SEQ ID NO: 719) | | |
| CEP290-172 | − | AGGCAAGAGACAUCUUG | 17 | upstream |
| | | (SEQ ID NO: 708) | | |
| CEP290-173 | − | AGGUAGAAUAUUGUAAUCAA | 20 | upstream |
| | | (SEQ ID NO: 1101) | | |
| CEP290-174 | − | AGUAGCUGAAAUAUUAA | 17 | upstream |
| | | (SEQ ID NO: 1102) | | |
| CEP290-175 | + | AGUCACAUGGGAGUCAC | 17 | downstream |
| | | (SEQ ID NO: 644) | | |
| CEP290-176 | − | AGUGCAUGUGGUGUCAAAUA | 20 | downstream |
| | | (SEQ ID NO: 627) | | |
| CEP290-177 | + | AGUUUGUUCUGGGUACA | 17 | upstream |
| | | (SEQ ID NO: 1103) | | |
| CEP290-178 | + | AUAAGCCUCUAUUUCUGAUG | 20 | upstream |
| | | (SEQ ID NO: 723) | | |
| CEP290-179 | − | AUAAGUCUUUUGAUAUA | 17 | downstream |
| | | (SEQ ID NO: 661) | | |
| CEP290-180 | + | AUACAUAAGAAAGAACACUG | 20 | downstream |
| | | (SEQ ID NO: 686) | | |
| CEP290-181 | + | AUAGUUUGUUCUGGGUACAG | 20 | upstream |
| | | (SEQ ID NO: 1107) | | |
| CEP290-182 | − | AUAUCUGUCUUCCUUAA | 17 | downstream |
| | | (SEQ ID NO: 658) | | |
| CEP290-183 | − | AUAUUAAGGGCUCUUCC | 17 | upstream |
| | | (SEQ ID NO: 1109) | | |
| CEP290-184 | − | AUAUUGUAAUCAAAGGA | 17 | upstream |
| | | (SEQ ID NO: 1110) | | |
| CEP290-185 | + | AUCAUGCAAGUGACCUA | 17 | upstream |
| | | (SEQ ID NO: 1111) | | |
| CEP290-186 | − | AUCUAAGAUCCUUUCAC | 17 | upstream |
| | | (SEQ ID NO: 696) | | |
| CEP290-187 | − | AUCUUCCUCAUCAGAAAUAG | 20 | upstream |
| | | (SEQ ID NO: 722) | | |
| CEP290-188 | + | AUGACAUGAGGUAAGUA | 17 | downstream |
| | | (SEQ ID NO: 656) | | |
| CEP290-189 | + | AUGACUCAUAAUUUAGU | 17 | upstream |
| | | (SEQ ID NO: 704) | | |
| CEP290-190 | − | AUGAGAGUGAUUAGUGG | 17 | downstream |
| | | (SEQ ID NO: 645) | | |
| CEP290-191 | + | AUGAGGAAGAUGAACAAAUC | 20 | upstream |
| | | (SEQ ID NO: 733) | | |
| CEP290-192 | + | AUGGGAGAAUAGUUUGUUCU | 20 | upstream |
| | | (SEQ ID NO: 1116) | | |
| CEP290-193 | − | AUUAGCUCAAAAGCUUUUGC | 20 | upstream |
| | | (SEQ ID NO: 633) | | |
| CEP290-194 | − | AUUAUGCCUAUUUAGUG | 17 | upstream |
| | | (SEQ ID NO: 703) | | |
| CEP290-195 | + | AUUCCAAGGAACAAAAGCCA | 20 | upstream |
| | | (SEQ ID NO: 1118) | | |
| CEP290-196 | − | AUUGAGGUAGAAUCAAGAAG | 20 | downstream |
| | | (SEQ ID NO: 1119) | | |
| CEP290-197 | + | AUUUGACACCACAUGCACUG | 20 | downstream |
| | | (SEQ ID NO: 623) | | |
| CEP290-198 | + | CAAAAGCCAGGGACCAU | 17 | upstream |
| | | (SEQ ID NO: 1120) | | |
| CEP290-199 | − | CAACAGUAGCUGAAAUAUUA | 20 | upstream |
| | | (SEQ ID NO: 1121) | | |
| CEP290-200 | + | CAAGAUGUCUCUUGCCU | 17 | upstream |
| | | (SEQ ID NO: 702) | | |
| CEP290-201 | − | CAGAACAAACUAUUCUCCCA | 20 | upstream |
| | | (SEQ ID NO: 1123) | | |
| CEP290-202 | − | CAGAUUUCAUGUGUGAAGAA | 20 | downstream |
| | | (SEQ ID NO: 1124) | | |
| CEP290-204 | − | CAGCAUUAGAAAGUCCU | 17 | upstream |
| | | (SEQ ID NO: 710) | | |
| CEP290-205 | + | CAGGGGUAAGAGAAAGGGAU | 20 | upstream |
| | | (SEQ ID NO: 1126) | | |
| CEP290-206 | + | CAGUAAGGAGGAUGUAAGAC | 20 | downstream |
| | | (SEQ ID NO: 676) | | |
| CEP290-207 | − | CAGUAGCUGAAAUAUUA | 17 | upstream |
| | | (SEQ ID NO: 1128) | | |
| CEP290-208 | + | CAUAAGAAAGAACACUG | 17 | downstream |
| | | (SEQ ID NO: 665) | | |
| CEP290-209 | + | CAUGGGAGAAUAGUUUGUUC | 20 | upstream |
| | | (SEQ ID NO: 1130) | | |
| CEP290-210 | + | CAUGGGAGUCACAGGGU | 17 | downstream |
| | | (SEQ ID NO: 652) | | |
| CEP290-211 | + | CAUUCCAAGGAACAAAAGCC | 20 | upstream |
| | | (SEQ ID NO: 1131) | | |
| CEP290-212 | + | CCACAAGAUGUCUCUUGCCU | 20 | upstream |
| | | (SEQ ID NO: 630) | | |
| CEP290-213 | − | CCUAGGCAAGAGACAUCUUG | 20 | upstream |
| | | (SEQ ID NO: 631) | | |
| CEP290-214 | − | CGUGCUCUUUUCUAUAUAUA | 20 | downstream |
| | | (SEQ ID NO: 624) | | |
| CEP290-215 | − | CGUUGUUCUGAGUAGCUUUC | 20 | upstream |
| | | (SEQ ID NO: 629) | | |
| CEP290-216 | + | CUAAGACACUGCCAAUA | 17 | downstream |
| | | (SEQ ID NO: 597) | | |
| CEP290-217 | + | CUAAUGCUGGAGAGGAU | 17 | upstream |
| | | (SEQ ID NO: 707) | | |
| CEP290-218 | + | CUAGAUGACAUGAGGUAAGU | 20 | downstream |
| | | (SEQ ID NO: 671) | | |
| CEP290-219 | + | CUAGGACUUUCUAAUGC | 17 | upstream |
| | | (SEQ ID NO: 695) | | |
| CEP290-220 | − | CUCAUACCUAUCCCUAU (SEQ | 17 | downstream |
| | | ID NO: 594) | | |
| CEP290-221 | − | CUCCAGCAUUAGAAAGUCCU | 20 | upstream |
| | | (SEQ ID NO: 720) | | |
| CEP290-222 | − | CUCUAUACCUUUUACUG | 17 | upstream |
| | | (SEQ ID NO: 701) | | |
| CEP290-223 | + | CUCUUGCUCUAGAUGACAUG | 20 | downstream |
| | | (SEQ ID NO: 675) | | |
| CEP290-224 | − | CUGCUGCUUUUGCCAAAGAG | 20 | upstream |
| | | (SEQ ID NO: 725) | | |
| CEP290-225 | − | CUGCUUUUGCCAAAGAG | 17 | upstream |
| | | (SEQ ID NO: 711) | | |
| CEP290-226 | − | CUGGCUUUUGUUCCUUGGAA | 20 | upstream |
| | | (SEQ ID NO: 1140) | | |
| CEP290-227 | + | CUGUAAGAUAACUACAA | 17 | upstream |
| | | (SEQ ID NO: 1141) | | |
| CEP290-228 | − | CUUAAGCAUACUUUUUUUAA | 20 | downstream |
| | | (SEQ ID NO: 690) | | |
| CEP290-229 | + | CUUAAUAUUUCAGCUACUGU | 20 | upstream |
| | | (SEQ ID NO: 1143) | | |
| CEP290-231 | + | CUUAGAUGUCUGGUUAAAAG | 20 | upstream |
| | | (SEQ ID NO: 1144) | | |
| CEP290-232 | − | CUUAUCUAAGAUCCUUUCAC | 20 | upstream |
| | | (SEQ ID NO: 734) | | |
| CEP290-233 | + | CUUGACUUUUACCCUUC (SEQ | 17 | downstream |
| | | ID NO: 649) | | |
| CEP290-234 | + | CUUGUUCUGUCCUCAGUAAA | 20 | upstream |
| | | (SEQ ID NO: 728) | | |
| CEP290-235 | + | CUUUUGACAGUUUUUAAGGC | 20 | downstream |
| | | (SEQ ID NO: 684) | | |

[0917] Table 8C provides targeting domains for break-induced deletion of genomic sequence including the mutation at the LCA10 target position in the CEP290 gene selected according to the third tier parameters. The targeting domains are within 1000 bp upstream of an Alu repeat, within 40 bp upstream of mutation, or 1000 bp downstream of the mutation, and start with G. It is contemplated herein that the targeting domain hybridizes to the target domain through complementary base pairing. Any of the targeting domains in the table can be used with a S. pyogenes Cas9 molecule that generates a double stranded break (Cas9 nuclease) or a single-stranded break (Cas9 nickase).

TABLE 8C

| | | | Target | Position |
|---|---|---|---|---|
| | DNA | | Site | relative to |
| gRNA Name | Strand | Targeting Domain | Length | mutation |
| CEP290-236 | − | GAAAUACAAAAACUGGA | 17 | downstream |
| | | (SEQ ID NO: 1148) | | |
| CEP290-237 | + | GCUUUUGACAGUUUUUA | 17 | downstream |
| | | (SEQ ID NO: 634) | | |
| CEP290-238 | + | GGAGAUAGAGACAGGAAUAA | 20 | downstream |
| | | (SEQ ID NO: 635) | | |
| CEP290-239 | − | GGAGUGCAGUGGAGUGAUCU | 20 | downstream |
| | | (SEQ ID NO: 1149) | | |
| CEP290-240 | + | GGGGUAAGAGAAAGGGA | 17 | upstream |
| | | (SEQ ID NO: 1150) | | |
| CEP290-241 | + | GGGUAAGAGAAAGGGAU | 17 | upstream |
| | | (SEQ ID NO: 1151) | | |
| CEP290-242 | − | GUCUCACUGUGUUGCCC (SEQ | 17 | downstream |
| | | ID NO: 1152) | | |
| CEP290-243 | − | GUGCAGUGGAGUGAUCU | 17 | downstream |
| | | (SEQ ID NO: 1153) | | |
| CEP290-244 | + | GUGUGUGUGUGUGUGUUAUG | 20 | upstream |
| | | (SEQ ID NO: 1154) | | |
| CEP290-245 | + | GUGUGUGUGUGUUAUGU | 17 | upstream |
| | | (SEQ ID NO: 1155) | | |

[0918] Table 8D provides targeting domains for break-induced deletion of genomic sequence including the mutation at the LCA10 target position in the CEP290 gene selected according to the fourth tier parameters. The targeting domains are within 1000 bp upstream of an Alu repeat, within 40 bp upstream of mutation, or 1000 bp downstream of the mutation, and do not start with G. It is contemplated herein that the targeting domain hybridizes to the target domain through complementary base pairing. Any of the targeting domains in the table can be used with a S. pyogenes Cas9 molecule that generates a double stranded break (Cas9 nuclease) or a single-stranded break (Cas9 nickase).

TABLE 8D

| | | | Target | Position |
|---|---|---|---|---|
| | DNA | | Site | relative to |
| gRNA Name | Strand | Targeting Domain | Length | mutation |
| CEP290-246 | − | AAAUACAAAAACUGGAU | 17 | downstream |
| | | (SEQ ID NO: 1156) | | |
| CEP290-247 | − | AAGCAUACUUUUUUUAA | 17 | downstream |
| | | (SEQ ID NO: 667) | | |
| CEP290-248 | + | AAGGCGGGGAGUCACAU | 17 | downstream |
| | | (SEQ ID NO: 636) | | |
| CEP290-249 | + | AAGUAUGCUUAAGAAAAAAA | 20 | downstream |
| | | (SEQ ID NO: 693) | | |
| CEP290-250 | + | ACAGAGGACAUGGAGAA | 17 | upstream |
| | | (SEQ ID NO: 715) | | |
| CEP290-251 | + | ACAGGGGUAAGAGAAAGGGA | 20 | upstream |
| | | (SEQ ID NO: 1160) | | |
| CEP290-253 | + | ACUAAGACACUGCCAAU | 17 | downstream |
| | | (SEQ ID NO: 603) | | |
| CEP290-254 | + | ACUCCACUGCACUCCAGCCU | 20 | downstream |
| | | (SEQ ID NO: 1161) | | |
| CEP290-255 | + | AGACUGGAGAUAGAGAC | 17 | downstream |
| | | (SEQ ID NO: 664) | | |
| CEP290-256 | − | AGAGUCUCACUGUGUUGCCC | 20 | downstream |
| | | (SEQ ID NO: 1163) | | |
| CEP290-257 | + | AGAUGAAAAAUACUCUU | 17 | upstream |
| | | (SEQ ID NO: 718) | | |
| CEP290-258 | − | AUAUUAUCUAUUUAUAG | 17 | upstream |
| | | (SEQ ID NO: 1165) | | |
| CEP290-259 | − | AUUUCAUGUGUGAAGAA | 17 | downstream |
| | | (SEQ ID NO: 1166) | | |
| CEP290-260 | − | AUUUUUUAUUAUCUUUAUUG | 20 | downstream |
| | | (SEQ ID NO: 694) | | |
| CEP290-261 | + | CAACUGGAAGAGAGAAA | 17 | downstream |
| | | (SEQ ID NO: 668) | | |
| CEP290-262 | + | CACUCCACUGCACUCCAGCC | 20 | downstream |
| | | (SEQ ID NO: 1169) | | |
| CEP290-263 | − | CACUGUGUUGCCCAGGC (SEQ | 17 | downstream |
| | | ID NO: 1170) | | |
| CEP290-264 | + | CCAAGGAACAAAAGCCA | 17 | upstream |
| | | (SEQ ID NO: 1171) | | |
| CEP290-265 | + | CCACUGCACUCCAGCCU (SEQ | 17 | downstream |
| | | ID NO: 1172) | | |
| CEP290-266 | − | CCCAGGCUGGAGUGCAG | 17 | downstream |
| | | (SEQ ID NO: 1173) | | |
| CEP290-267 | − | CCCUGGCUUUUGUUCCU (SEQ | 17 | upstream |
| | | ID NO: 1174) | | |
| CEP290-268 | + | CGCUUGAACCUGGGAGGCAG | 20 | downstream |
| | | (SEQ ID NO: 1175) | | |
| CEP290-269 | − | UAAGGAAAUACAAAAAC | 17 | downstream |
| | | (SEQ ID NO: 1176) | | |
| CEP290-270 | − | UAAUAAGGAAAUACAAAAAC | 20 | downstream |
| | | (SEQ ID NO: 1177) | | |
| CEP290-271 | − | UACUGCAACCUCUGCCUCCC | 20 | downstream |
| | | (SEQ ID NO: 1178) | | |
| CEP290-272 | + | UAUGCUUAAGAAAAAAA | 17 | downstream |
| | | (SEQ ID NO: 669) | | |
| CEP290-273 | + | UCAUUCUUGUGGCAGUAAGG | 20 | downstream |
| | | (SEQ ID NO: 692) | | |
| CEP290-274 | + | UCCACUGCACUCCAGCC (SEQ | 17 | downstream |
| | | ID NO: 1181) | | |
| CEP290-275 | − | UCUCACUGUGUUGCCCAGGC | 20 | downstream |
| | | (SEQ ID NO: 1182) | | |
| CEP290-276 | + | UGAACAAGUUUUGAAAC | 17 | downstream |
| | | (SEQ ID NO: 659) | | |
| CEP290-277 | − | UGCAACCUCUGCCUCCC (SEQ | 17 | downstream |
| | | ID NO: 1184) | | |
| CEP290-278 | + | UGUGUGUGUGUGUGUUAUGU | 20 | upstream |
| | | (SEQ ID NO: 1185) | | |
| CEP290-279 | + | UGUGUGUGUGUGUUAUG | 17 | upstream |
| | | (SEQ ID NO: 1186) | | |
| CEP290-280 | + | UUCUUGUGGCAGUAAGG | 17 | downstream |
| | | (SEQ ID NO: 666) | | |
| CEP290-281 | + | UUGAACCUGGGAGGCAG | 17 | downstream |
| | | (SEQ ID NO: 1188) | | |
| CEP290-282 | − | UUGCCCAGGCUGGAGUGCAG | 20 | downstream |
| | | (SEQ ID NO: 1189) | | |
| CEP290-283 | − | UUUUAUUAUCUUUAUUG | 17 | downstream |
| | | (SEQ ID NO: 670) | | |

[0919] Table 9A provides targeting domains for break-induced deletion of genomic sequence including the mutation at the LCA10 target position in the CEP290 gene selected according to the first tier parameters. The targeting domains are within 1000 bp upstream of an Alu repeat, within 40 bp upstream of mutation, or 1000 bp downstream of the mutation, have good orthogonality, start with G and PAM is NNGRRT. It is contemplated herein that the targeting domain hybridizes to the target domain through complementary base pairing. Any of the targeting domains in the table can be used with a S. aureus Cas9 molecule that generates a double stranded break (Cas9 nuclease) or a single-stranded break (Cas9 nickase).

TABLE 9A
1st Tier

| | | | Target | Position |
|---|---|---|---|---|
| | DNA | | Site | relative to |
| gRNA Name | Strand | Targeting Domain | Length | mutation |
| CEP290-284 | + | GCUAAAUCAUGCAAGUGACCUAAG | 24 | upstream |
| | | (SEQ ID NO: 511) | | |
| CEP290-487 | − | GGUCACUUGCAUGAUUUAG (SEQ ID | 19 | upstream |
| | | NO: 512) | | |
| CEP290-486 | − | GUCACUUGCAUGAUUUAG (SEQ ID | 18 | upstream |
| | | NO: 513) | | |
| CEP290-285 | + | GCCUAGGACUUUCUAAUGCUGGA | 23 | upstream |
| | | (SEQ ID NO: 514) | | |
| CEP290-479 | + | GGACUUUCUAAUGCUGGA (SEQ ID | 18 | upstream |
| | | NO: 515) | | |
| CEP290-286 | + | GGGACCAUGGGAGAAUAGUUUGUU | 24 | upstream |
| | | (SEQ ID NO: 516) | | |
| CEP290-287 | + | GGACCAUGGGAGAAUAGUUUGUU | 23 | upstream |
| | | (SEQ ID NO: 517) | | |
| CEP290-288 | + | GACCAUGGGAGAAUAGUUUGUU | 22 | upstream |
| | | (SEQ ID NO: 518) | | |
| CEP290-289 | − | GGUCCCUGGCUUUUGUUCCUUGGA | 24 | upstream |
| | | (SEQ ID NO: 519) | | |
| CEP290-290 | − | GUCCCUGGCUUUUGUUCCUUGGA | 23 | upstream |
| | | (SEQ ID NO: 520) | | |
| CEP290-374 | − | GAAAACGUUGUUCUGAGUAGCUUU | 24 | upstream |
| | | (SEQ ID NO: 521) | | |
| CEP290-478 | − | GUUGUUCUGAGUAGCUUU (SEQ ID | 18 | upstream |
| | | NO: 522) | | |
| CEP290-489 | − | GGUCCCUGGCUUUUGUUCCU (SEQ | 20 | upstream |
| | | ID NO: 494) | | |
| CEP290-488 | − | GUCCCUGGCUUUUGUUCCU (SEQ ID | 19 | upstream |
| | | NO: 523) | | |
| CEP290-291 | − | GACAUCUUGUGGAUAAUGUAUCA | 23 | upstream |
| | | (SEQ ID NO: 524) | | |
| CEP290-292 | − | GUCCUAGGCAAGAGACAUCUU | 21 | upstream |
| | | (SEQ ID NO: 525) | | |
| CEP290-293 | + | GCCAGCAAAAGCUUUUGAGCUAA | 23 | upstream |
| | | (SEQ ID NO: 526) | | |
| CEP290-481 | + | GCAAAAGCUUUUGAGCUAA (SEQ ID | 19 | upstream |
| | | NO: 527) | | |
| CEP290-294 | + | GAUCUUAUUCUACUCCUGUGA | 21 | upstream |
| | | (SEQ ID NO: 528) | | |
| CEP290-295 | − | GCUUUCAGGAUUCCUACUAAAUU | 23 | upstream |
| | | (SEQ ID NO: 529) | | |
| CEP290-323 | + | GUUCUGUCCUCAGUAAAAGGUA | 22 | upstream |
| | | (SEQ ID NO: 530) | | |
| CEP290-480 | + | GAACAACGUUUUCAUUUA (SEQ ID | 18 | upstream |
| | | NO: 531) | | |
| CEP290-296 | − | GUAGAAUAUCAUAAGUUACAAUCU | 24 | upstream |
| | | (SEQ ID NO: 532) | | |
| CEP290-297 | − | GAAUAUCAUAAGUUACAAUCU | 21 | upstream |
| | | (SEQ ID NO: 533) | | |
| CEP290-298 | + | GUGGCUGUAAGAUAACUACA (SEQ | 20 | upstream |
| | | ID NO: 534) | | |
| CEP290-299 | + | GGCUGUAAGAUAACUACA (SEQ ID | 18 | upstream |
| | | NO: 535) | | |
| CEP290-300 | − | GUUUAACGUUAUCAUUUUCCCA | 22 | upstream |
| | | (SEQ ID NO: 536) | | |
| CEP290-301 | + | GUAAGAGAAAGGGAUGGGCACUUA | 24 | upstream |
| | | (SEQ ID NO: 537) | | |
| CEP290-492 | + | GAGAAAGGGAUGGGCACUUA (SEQ | 20 | upstream |
| | | ID NO: 538) | | |
| CEP290-491 | + | GAAAGGGAUGGGCACUUA (SEQ ID | 18 | upstream |
| | | NO: 539) | | |
| CEP290-483 | − | GUAAAUGAAAACGUUGUU (SEQ ID | 18 | upstream |
| | | NO: 540) | | |
| CEP290-302 | + | GAUAAACAUGACUCAUAAUUUAGU | 24 | upstream |
| | | (SEQ ID NO: 541) | | |
| CEP290-303 | + | GGAACAAAAGCCAGGGACCAUGG | 23 | upstream |
| | | (SEQ ID NO: 542) | | |
| CEP290-304 | + | GAACAAAAGCCAGGGACCAUGG | 22 | upstream |
| | | (SEQ ID NO: 543) | | |
| CEP290-305 | + | GGGAGAAUAGUUUGUUCUGGGUAC | 24 | upstream |
| | | (SEQ ID NO: 544) | | |
| CEP290-306 | + | GGAGAAUAGUUUGUUCUGGGUAC | 23 | upstream |
| | | (SEQ ID NO: 545) | | |
| CEP290-307 | + | GAGAAUAGUUUGUUCUGGGUAC | 22 | upstream |
| | | (SEQ ID NO: 546) | | |
| CEP290-490 | + | GAAUAGUUUGUUCUGGGUAC (SEQ | 20 | upstream |
| | | ID NO: 468) | | |
| CEP290-482 | − | GAAAUAGAGGCUUAUGGAUU (SEQ | 20 | upstream |
| | | ID NO: 547) | | |
| CEP290-308 | + | GUUCUGGGUACAGGGGUAAGAGAA | 24 | upstream |
| | | (SEQ ID NO: 548) | | |
| CEP290-494 | + | GGGUACAGGGGUAAGAGAA (SEQ | 19 | upstream |
| | | ID NO: 549) | | |
| CEP290-493 | + | GGUACAGGGGUAAGAGAA (SEQ ID | 18 | upstream |
| | | NO: 550) | | |
| CEP290-309 | − | GUAAAUUCUCAUCAUUUUUUAUUG | 24 | upstream |
| | | (SEQ ID NO: 551) | | |
| CEP290-310 | + | GGAGAGGAUAGGACAGAGGACAUG | 24 | upstream |
| | | (SEQ ID NO: 552) | | |
| CEP290-311 | + | GAGAGGAUAGGACAGAGGACAUG | 23 | upstream |
| | | (SEQ ID NO: 553) | | |
| CEP290-313 | + | GAGGAUAGGACAGAGGACAUG | 21 | upstream |
| | | (SEQ ID NO: 554) | | |
| CEP290-485 | + | GGAUAGGACAGAGGACAUG (SEQ | 19 | upstream |
| | | ID NO: 555) | | |
| CEP290-484 | + | GAUAGGACAGAGGACAUG (SEQ ID | 18 | upstream |
| | | NO: 556) | | |
| CEP290-314 | − | GAAUAAAUGUAGAAUUUUAAUG | 22 | upstream |
| | | (SEQ ID NO: 557) | | |
| CEP290-64 | − | GUCAAAAGCUACCGGUUACCUG | 22 | downstream |
| | | (SEQ ID NO: 558) | | |
| CEP290-315 | + | GUUUUUAAGGCGGGGAGUCACAU | 23 | downstream |
| | | (SEQ ID NO: 559) | | |
| CEP290-203 | − | GUCUUACAUCCUCCUUACUGCCAC | 24 | downstream |
| | | (SEQ ID NO: 560) | | |
| CEP290-316 | + | GAGUCACAGGGUAGGAUUCAUGUU | 24 | downstream |
| | | (SEQ ID NO: 561) | | |
| CEP290-317 | + | GUCACAGGGUAGGAUUCAUGUU | 22 | downstream |
| | | (SEQ ID NO: 562) | | |
| CEP290-318 | − | GGCACAGAGUUCAAGCUAAUACAU | 24 | downstream |
| | | (SEQ ID NO: 563) | | |
| CEP290-319 | − | GCACAGAGUUCAAGCUAAUACAU | 23 | downstream |
| | | (SEQ ID NO: 564) | | |
| CEP290-505 | − | GAGUUCAAGCUAAUACAU (SEQ ID | 18 | downstream |
| | | NO: 565) | | |
| CEP290-496 | + | GAUGCAGAACUAGUGUAGAC (SEQ | 20 | downstream |
| | | ID NO: 460) | | |
| CEP290-320 | − | GUGUUGAGUAUCUCCUGUUUGGCA | 24 | downstream |
| | | (SEQ ID NO: 566) | | |
| CEP290-321 | − | GUUGAGUAUCUCCUGUUUGGCA | 22 | downstream |
| | | (SEQ ID NO: 567) | | |
| CEP290-504 | − | GAGUAUCUCCUGUUUGGCA (SEQ ID | 19 | downstream |
| | | NO: 568) | | |
| CEP290-322 | − | GAAAAUCAGAUUUCAUGUGUG | 21 | downstream |
| | | (SEQ ID NO: 569) | | |
| CEP290-324 | − | GCCACAAGAAUGAUCAUUCUAAAC | 24 | downstream |
| | | (SEQ ID NO: 570) | | |
| CEP290-325 | + | GGCGGGGAGUCACAUGGGAGUCA | 23 | downstream |
| | | (SEQ ID NO: 571) | | |
| CEP290-326 | + | GCGGGGAGUCACAUGGGAGUCA | 22 | downstream |
| | | (SEQ ID NO: 572) | | |
| CEP290-499 | + | GGGGAGUCACAUGGGAGUCA (SEQ | 20 | downstream |
| | | ID NO: 573) | | |
| CEP290-498 | + | GGGAGUCACAUGGGAGUCA (SEQ ID | 19 | downstream |
| | | NO: 574) | | |
| CEP290-497 | + | GGAGUCACAUGGGAGUCA (SEQ ID | 18 | downstream |
| | | NO: 575) | | |
| CEP290-327 | + | GCUUUUGACAGUUUUUAAGGCG | 22 | downstream |
| | | (SEQ ID NO: 576) | | |
| CEP290-328 | + | GAUCAUUCUUGUGGCAGUAAG | 21 | downstream |
| | | (SEQ ID NO: 577) | | |
| CEP290-329 | − | GAGCAAGAGAUGAACUAG (SEQ ID | 18 | downstream |
| | | NO: 578) | | |
| CEP290-500 | + | GCCUGAACAAGUUUUGAAAC (SEQ | 20 | downstream |
| | | ID NO: 480) | | |
| CEP290-330 | − | GUAGAUUGAGGUAGAAUCAAGAA | 23 | downstream |
| | | (SEQ ID NO: 579) | | |
| CEP290-506 | − | GAUUGAGGUAGAAUCAAGAA (SEQ | 20 | downstream |
| | | ID NO: 580) | | |
| CEP290-331 | + | GGAUGUAAGACUGGAGAUAGAGAC | 24 | downstream |
| | | (SEQ ID NO: 581) | | |
| CEP290-332 | + | GAUGUAAGACUGGAGAUAGAGAC | 23 | downstream |
| | | (SEQ ID NO: 582) | | |
| CEP290-503 | + | GUAAGACUGGAGAUAGAGAC (SEQ | 20 | downstream |
| | | ID NO: 497) | | |
| CEP290-333 | + | GGGAGUCACAUGGGAGUCACAGGG | 24 | downstream |
| | | (SEQ ID NO: 583) | | |
| CEP290-334 | + | GGAGUCACAUGGGAGUCACAGGG | 23 | downstream |
| | | (SEQ ID NO: 584) | | |
| CEP290-335 | + | GAGUCACAUGGGAGUCACAGGG | 22 | downstream |
| | | (SEQ ID NO: 585) | | |
| CEP290-502 | + | GUCACAUGGGAGUCACAGGG (SEQ | 20 | downstream |
| | | ID NO: 586) | | |
| CEP290-336 | − | GUUUACAUAUCUGUCUUCCUUAA | 23 | downstream |
| | | (SEQ ID NO: 587) | | |
| CEP290-507 | − | GAUUUCAUGUGUGAAGAA (SEQ ID | 18 | downstream |
| | | NO: 588) | | |

[0920] Table 9B provides targeting domains for break-induced deletion of genomic sequence including the mutation at the LCA10 target position in the CEP290 gene selected according to the second tier parameters. The targeting domains are within 1000 bp upstream of an Alu repeat, within 40 bp upstream of mutation, or 1000 bp downstream of the mutation, and have good orthogonality. It is contemplated herein that the targeting domain hybridizes to the target domain through complementary base pairing. Any of the targeting domains in the table can be used with a S. aureus Cas9 molecule that generates a double stranded break (Cas9 nuclease) or a single-stranded break (Cas9 nickase).

TABLE 9B

| | | | Target | Position |
|---|---|---|---|---|
| | DNA | | Site | relative to |
| gRNA Name | Strand | Targeting Domain | Length | mutation |
| CEP290-337 | + | AAAUCAUGCAAGUGACCUAAG | 21 | upstream |
| | | (SEQ ID NO: 1191) | | |
| CEP290-338 | + | AAUCAUGCAAGUGACCUAAG (SEQ | 20 | upstream |
| | | ID NO: 1192) | | |
| CEP290-339 | + | AUCAUGCAAGUGACCUAAG (SEQ ID | 19 | upstream |
| | | NO: 1193) | | |
| CEP290-340 | − | AGGUCACUUGCAUGAUUUAG (SEQ | 20 | upstream |
| | | ID NO: 1194) | | |
| CEP290-341 | − | AAUAUUAAGGGCUCUUCCUGGACC | 24 | upstream |
| | | (SEQ ID NO: 1195) | | |
| CEP290-342 | − | AUAUUAAGGGCUCUUCCUGGACC | 23 | upstream |
| | | (SEQ ID NO: 1196) | | |
| CEP290-343 | − | AUUAAGGGCUCUUCCUGGACC (SEQ | 21 | upstream |
| | | ID NO: 1197) | | |
| CEP290-344 | − | AAGGGCUCUUCCUGGACC (SEQ ID | 18 | upstream |
| | | NO: 1198) | | |
| CEP290-345 | + | AGGACUUUCUAAUGCUGGA (SEQ ID | 19 | upstream |
| | | NO: 1199) | | |
| CEP290-346 | + | ACCAUGGGAGAAUAGUUUGUU | 21 | upstream |
| | | (SEQ ID NO: 1200) | | |
| CEP290-347 | + | AUGGGAGAAUAGUUUGUU (SEQ ID | 18 | upstream |
| | | NO: 1201) | | |
| CEP290-348 | + | ACUCCUGUGAAAGGAUCUUAGAU | 23 | upstream |
| | | (SEQ ID NO: 1202) | | |
| CEP290-349 | − | AAAACGUUGUUCUGAGUAGCUUU | 23 | upstream |
| | | (SEQ ID NO: 1203) | | |
| CEP290-350 | − | AAACGUUGUUCUGAGUAGCUUU | 22 | upstream |
| | | (SEQ ID NO: 1204) | | |
| CEP290-351 | − | AACGUUGUUCUGAGUAGCUUU | 21 | upstream |
| | | (SEQ ID NO: 1205) | | |
| CEP290-352 | − | ACGUUGUUCUGAGUAGCUUU (SEQ | 20 | upstream |
| | | ID NO: 749) | | |
| CEP290-353 | − | AUUUAUAGUGGCUGAAUGACUU | 22 | upstream |
| | | (SEQ ID NO: 1207) | | |
| CEP290-354 | − | AUAGUGGCUGAAUGACUU (SEQ ID | 18 | upstream |
| | | NO: 1208) | | |
| CEP290-355 | − | AUGGUCCCUGGCUUUUGUUCCU | 22 | upstream |
| | | (SEQ ID NO: 1209) | | |
| CEP290-356 | − | AGACAUCUUGUGGAUAAUGUAUCA | 24 | upstream |
| | | (SEQ ID NO: 1210) | | |
| CEP290-357 | − | ACAUCUUGUGGAUAAUGUAUCA | 22 | upstream |
| | | (SEQ ID NO: 1211) | | |
| CEP290-358 | − | AUCUUGUGGAUAAUGUAUCA (SEQ | 20 | upstream |
| | | ID NO: 835) | | |
| CEP290-359 | − | AAAGUCCUAGGCAAGAGACAUCUU | 24 | upstream |
| | | (SEQ ID NO: 1213) | | |
| CEP290-360 | − | AAGUCCUAGGCAAGAGACAUCUU | 23 | upstream |
| | | (SEQ ID NO: 1214) | | |
| CEP290-361 | − | AGUCCUAGGCAAGAGACAUCUU | 22 | upstream |
| | | (SEQ ID NO: 1215) | | |
| CEP290-362 | + | AGCCAGCAAAAGCUUUUGAGCUAA | 24 | upstream |
| | | (SEQ ID NO: 1216) | | |
| CEP290-363 | + | AGCAAAAGCUUUUGAGCUAA (SEQ | 20 | upstream |
| | | ID NO: 763) | | |
| CEP290-364 | + | AGAUCUUAUUCUACUCCUGUGA | 22 | upstream |
| | | (SEQ ID NO: 1218) | | |
| CEP290-365 | + | AUCUUAUUCUACUCCUGUGA (SEQ | 20 | upstream |
| | | ID NO: 764) | | |
| CEP290-366 | − | AUCUAAGAUCCUUUCACAGGAG | 22 | upstream |
| | | (SEQ ID NO: 1220) | | |
| CEP290-369 | − | AAGAUCCUUUCACAGGAG (SEQ ID | 18 | upstream |
| | | NO: 1221) | | |
| CEP290-370 | − | AGCUUUCAGGAUUCCUACUAAAUU | 24 | upstream |
| | | (SEQ ID NO: 1222) | | |
| CEP290-371 | + | ACUCAGAACAACGUUUUCAUUUA | 23 | upstream |
| | | (SEQ ID NO: 1223) | | |
| CEP290-372 | + | AGAACAACGUUUUCAUUUA (SEQ ID | 19 | upstream |
| | | NO: 1224) | | |
| CEP290-373 | − | AGAAUAUCAUAAGUUACAAUCU | 22 | upstream |
| | | (SEQ ID NO: 1225) | | |
| CEP290-375 | − | AAUAUCAUAAGUUACAAUCU (SEQ | 20 | upstream |
| | | ID NO: 1226) | | |
| CEP290-376 | − | AUAUCAUAAGUUACAAUCU (SEQ ID | 19 | upstream |
| | | NO: 1227) | | |
| CEP290-377 | + | AAGUGGCUGUAAGAUAACUACA | 22 | upstream |
| | | (SEQ ID NO: 1228) | | |
| CEP290-378 | + | AGUGGCUGUAAGAUAACUACA | 21 | upstream |
| | | (SEQ ID NO: 1229) | | |
| CEP290-379 | − | AUGUUUAACGUUAUCAUUUUCCCA | 24 | upstream |
| | | (SEQ ID NO: 1230) | | |
| CEP290-380 | − | AACGUUAUCAUUUUCCCA (SEQ ID | 18 | upstream |
| | | NO: 1231) | | |
| CEP290-381 | + | AAGAGAAAGGGAUGGGCACUUA | 22 | upstream |
| | | (SEQ ID NO: 1232) | | |
| CEP290-382 | + | AGAGAAAGGGAUGGGCACUUA | 21 | upstream |
| | | (SEQ ID NO: 1233) | | |
| CEP290-383 | + | AGAAAGGGAUGGGCACUUA (SEQ | 19 | upstream |
| | | ID NO: 1234) | | |
| CEP290-384 | − | AUUCAGUAAAUGAAAACGUUGUU | 23 | upstream |
| | | (SEQ ID NO: 1235) | | |
| CEP290-385 | − | AGUAAAUGAAAACGUUGUU (SEQ | 19 | upstream |
| | | ID NO: 1236) | | |
| CEP290-386 | + | AUAAACAUGACUCAUAAUUUAGU | 23 | upstream |
| | | (SEQ ID NO: 1237) | | |
| CEP290-387 | + | AAACAUGACUCAUAAUUUAGU | 21 | upstream |
| | | (SEQ ID NO: 1238) | | |
| CEP290-388 | + | AACAUGACUCAUAAUUUAGU (SEQ | 20 | upstream |
| | | ID NO: 721) | | |
| CEP290-389 | + | ACAUGACUCAUAAUUUAGU (SEQ ID | 19 | upstream |
| | | NO: 1240) | | |
| CEP290-390 | − | AUUCUUAUCUAAGAUCCUUUCAC | 23 | upstream |
| | | (SEQ ID NO: 1241) | | |
| CEP290-391 | + | AGGAACAAAAGCCAGGGACCAUGG | 24 | upstream |
| | | (SEQ ID NO: 1242) | | |
| CEP290-392 | + | AACAAAAGCCAGGGACCAUGG | 21 | upstream |
| | | (SEQ ID NO: 1243) | | |
| CEP290-393 | + | ACAAAAGCCAGGGACCAUGG (SEQ | 20 | upstream |
| | | ID NO: 1244) | | |
| CEP290-394 | + | AAAAGCCAGGGACCAUGG (SEQ ID | 18 | upstream |
| | | NO: 1245) | | |
| CEP290-395 | + | AGAAUAGUUUGUUCUGGGUAC | 21 | upstream |
| | | (SEQ ID NO: 1246) | | |
| CEP290-396 | + | AAUAGUUUGUUCUGGGUAC (SEQ | 19 | upstream |
| | | ID NO: 1247) | | |
| CEP290-397 | + | AUAGUUUGUUCUGGGUAC (SEQ ID | 18 | upstream |
| | | NO: 1248) | | |
| CEP290-398 | − | AUCAGAAAUAGAGGCUUAUGGAUU | 24 | upstream |
| | | (SEQ ID NO: 1249) | | |
| CEP290-399 | − | AGAAAUAGAGGCUUAUGGAUU | 21 | upstream |
| | | (SEQ ID NO: 1250) | | |
| CEP290-400 | − | AAAUAGAGGCUUAUGGAUU (SEQ | 19 | upstream |
| | | ID NO: 1251) | | |
| CEP290-401 | − | AAUAGAGGCUUAUGGAUU (SEQ ID | 18 | upstream |
| | | NO: 1252) | | |
| CEP290-402 | − | AAUAUAUUAUCUAUUUAUAGUGG | 23 | upstream |
| | | (SEQ ID NO: 1253) | | |
| CEP290-403 | − | AUAUAUUAUCUAUUUAUAGUGG | 22 | upstream |
| | | (SEQ ID NO: 1254) | | |
| CEP290-404 | − | AUAUUAUCUAUUUAUAGUGG (SEQ | 20 | upstream |
| | | ID NO: 1255) | | |
| CEP290-405 | − | AUUAUCUAUUUAUAGUGG (SEQ ID | 18 | upstream |
| | | NO: 1256) | | |
| CEP290-406 | − | AAAUUCUCAUCAUUUUUUAUUG | 22 | upstream |
| | | (SEQ ID NO: 1257) | | |
| CEP290-407 | − | AAUUCUCAUCAUUUUUUAUUG | 21 | upstream |
| | | (SEQ ID NO: 1258) | | |
| CEP290-408 | − | AUUCUCAUCAUUUUUUAUUG (SEQ | 20 | upstream |
| | | ID NO: 1259) | | |
| CEP290-409 | + | AGAGGAUAGGACAGAGGACAUG | 22 | upstream |
| | | (SEQ ID NO: 1260) | | |
| CEP290-410 | + | AGGAUAGGACAGAGGACAUG (SEQ | 20 | upstream |
| | | ID NO: 827) | | |
| CEP290-411 | − | AGAAUAAAUGUAGAAUUUUAAUG | 23 | upstream |
| | | (SEQ ID NO: 1262) | | |
| CEP290-412 | − | AAUAAAUGUAGAAUUUUAAUG | 21 | upstream |
| | | (SEQ ID NO: 1263) | | |
| CEP290-413 | − | AUAAAUGUAGAAUUUUAAUG (SEQ | 20 | upstream |
| | | ID NO: 1264) | | |
| CEP290-414 | − | AAAUGUAGAAUUUUAAUG (SEQ ID | 18 | upstream |
| | | NO: 1265) | | |
| CEP290-415 | − | AUUUUUUAUUGUAGAAUAAAUG | 22 | upstream |
| | | (SEQ ID NO: 1266) | | |
| CEP290-416 | + | CUAAAUCAUGCAAGUGACCUAAG | 23 | upstream |
| | | (SEQ ID NO: 1267) | | |
| CEP290-417 | − | CCUUAGGUCACUUGCAUGAUUUAG | 24 | upstream |
| | | (SEQ ID NO: 1268) | | |
| CEP290-418 | − | CUUAGGUCACUUGCAUGAUUUAG | 23 | upstream |
| | | (SEQ ID NO: 1269) | | |
| CEP290-419 | + | CCUAGGACUUUCUAAUGCUGGA | 22 | upstream |
| | | (SEQ ID NO: 1270) | | |
| CEP290-420 | + | CUAGGACUUUCUAAUGCUGGA | 21 | upstream |
| | | (SEQ ID NO: 1271) | | |
| CEP290-421 | + | CCAUGGGAGAAUAGUUUGUU (SEQ | 20 | upstream |
| | | ID NO: 1272) | | |
| CEP290-422 | + | CAUGGGAGAAUAGUUUGUU (SEQ | 19 | upstream |
| | | ID NO: 1273) | | |
| CEP290-423 | + | CUCCUGUGAAAGGAUCUUAGAU | 22 | upstream |
| | | (SEQ ID NO: 1274) | | |
| CEP290-424 | + | CCUGUGAAAGGAUCUUAGAU (SEQ | 20 | upstream |
| | | ID NO: 860) | | |
| CEP290-426 | + | CUGUGAAAGGAUCUUAGAU (SEQ | 19 | upstream |
| | | ID NO: 1276) | | |
| CEP290-427 | − | CCCUGGCUUUUGUUCCUUGGA (SEQ | 21 | upstream |
| | | ID NO: 1277) | | |
| CEP290-428 | − | CCUGGCUUUUGUUCCUUGGA (SEQ | 20 | upstream |
| | | ID NO: 1278) | | |
| CEP290-429 | − | CUGGCUUUUGUUCCUUGGA (SEQ ID | 19 | upstream |
| | | NO: 1279) | | |
| CEP290-430 | − | CGUUGUUCUGAGUAGCUUU (SEQ ID | 19 | upstream |
| | | NO: 1280) | | |
| CEP290-431 | − | CUAUUUAUAGUGGCUGAAUGACUU | 24 | upstream |
| | | (SEQ ID NO: 1281) | | |
| CEP290-432 | − | CCAUGGUCCCUGGCUUUUGUUCCU | 24 | upstream |
| | | (SEQ ID NO: 1282) | | |
| CEP290-433 | − | CAUGGUCCCUGGCUUUUGUUCCU | 23 | upstream |
| | | (SEQ ID NO: 1283) | | |
| CEP290-434 | − | CAUCUUGUGGAUAAUGUAUCA | 21 | upstream |
| | | (SEQ ID NO: 1284) | | |
| CEP290-435 | − | CUUGUGGAUAAUGUAUCA (SEQ ID | 18 | upstream |
| | | NO: 1285) | | |
| CEP290-437 | − | CCUAGGCAAGAGACAUCUU (SEQ ID | 19 | upstream |
| | | NO: 1286) | | |
| CEP290-438 | − | CUAGGCAAGAGACAUCUU (SEQ ID | 18 | upstream |
| | | NO: 1287) | | |
| CEP290-439 | + | CCAGCAAAAGCUUUUGAGCUAA | 22 | upstream |
| | | (SEQ ID NO: 1288) | | |
| CEP290-440 | + | CAGCAAAAGCUUUUGAGCUAA | 21 | upstream |
| | | (SEQ ID NO: 1289) | | |
| CEP290-441 | + | CAAAAGCUUUUGAGCUAA (SEQ ID | 18 | upstream |
| | | NO: 1290) | | |
| CEP290-442 | + | CUUAUUCUACUCCUGUGA (SEQ ID | 18 | upstream |
| | | NO: 1291) | | |
| CEP290-443 | − | CUAAGAUCCUUUCACAGGAG (SEQ | 20 | upstream |
| | | ID NO: 861) | | |
| CEP290-444 | − | CUUCCUCAUCAGAAAUAGAGGCUU | 24 | upstream |
| | | (SEQ ID NO: 1293) | | |
| CEP290-445 | − | CCUCAUCAGAAAUAGAGGCUU | 21 | upstream |
| | | (SEQ ID NO: 1294) | | |
| CEP290-446 | − | CUCAUCAGAAAUAGAGGCUU (SEQ | 20 | upstream |
| | | ID NO: 865) | | |
| CEP290-447 | − | CAUCAGAAAUAGAGGCUU (SEQ ID | 18 | upstream |
| | | NO: 1296) | | |
| CEP290-448 | − | CUUUCAGGAUUCCUACUAAAUU | 22 | upstream |
| | | (SEQ ID NO: 1297) | | |
| CEP290-449 | − | CAGGAUUCCUACUAAAUU (SEQ ID | 18 | upstream |
| | | NO: 1298) | | |
| CEP290-450 | + | CUGUCCUCAGUAAAAGGUA (SEQ ID | 19 | upstream |
| | | NO: 1299) | | |
| CEP290-451 | + | CUCAGAACAACGUUUUCAUUUA | 22 | upstream |
| | | (SEQ ID NO: 1300) | | |
| CEP290-452 | + | CAGAACAACGUUUUCAUUUA (SEQ | 20 | upstream |
| | | ID NO: 761) | | |
| CEP290-453 | + | CAAGUGGCUGUAAGAUAACUACA | 23 | upstream |
| | | (SEQ ID NO: 1302) | | |
| CEP290-454 | − | CAUUCAGUAAAUGAAAACGUUGUU | 24 | upstream |
| | | (SEQ ID NO: 1303) | | |
| CEP290-457 | − | CAGUAAAUGAAAACGUUGUU (SEQ | 20 | upstream |
| | | ID NO: 849) | | |
| CEP290-458 | + | CAUGACUCAUAAUUUAGU (SEQ ID | 18 | upstream |
| | | NO: 1305) | | |
| CEP290-459 | − | CUUAUCUAAGAUCCUUUCAC (SEQ | 20 | upstream |
| | | ID NO: 734) | | |
| CEP290-460 | + | CAAAAGCCAGGGACCAUGG (SEQ ID | 19 | upstream |
| | | NO: 1307) | | |
| CEP290-461 | − | CAGAAAUAGAGGCUUAUGGAUU | 22 | upstream |
| | | (SEQ ID NO: 1308) | | |
| CEP290-462 | + | CUGGGUACAGGGGUAAGAGAA | 21 | upstream |
| | | (SEQ ID NO: 1309) | | |
| CEP290-463 | − | CAAUAUAUUAUCUAUUUAUAGUGG | 24 | upstream |
| | | (SEQ ID NO: 1310) | | |
| CEP290-464 | − | CAUUUUUUAUUGUAGAAUAAAUG | 23 | upstream |
| | | (SEQ ID NO: 1311) | | |
| CEP290-465 | + | UAAAUCAUGCAAGUGACCUAAG | 22 | upstream |
| | | (SEQ ID NO: 1312) | | |
| CEP290-466 | + | UCAUGCAAGUGACCUAAG (SEQ ID | 18 | upstream |
| | | NO: 1313) | | |
| CEP290-467 | − | UUAGGUCACUUGCAUGAUUUAG | 22 | upstream |
| | | (SEQ ID NO: 1314) | | |
| CEP290-468 | − | UAGGUCACUUGCAUGAUUUAG | 21 | upstream |
| | | (SEQ ID NO: 1315) | | |
| CEP290-469 | − | UAUUAAGGGCUCUUCCUGGACC | 22 | upstream |
| | | (SEQ ID NO: 1316) | | |
| CEP290-470 | − | UUAAGGGCUCUUCCUGGACC (SEQ | 20 | upstream |
| | | ID NO: 1317) | | |
| CEP290-471 | − | UAAGGGCUCUUCCUGGACC (SEQ ID | 19 | upstream |
| | | NO: 1318) | | |
| CEP290-472 | + | UGCCUAGGACUUUCUAAUGCUGGA | 24 | upstream |
| | | (SEQ ID NO: 1319) | | |
| CEP290-473 | + | UAGGACUUUCUAAUGCUGGA (SEQ | 20 | upstream |
| | | ID NO: 882) | | |
| CEP290-474 | + | UACUCCUGUGAAAGGAUCUUAGAU | 24 | upstream |
| | | (SEQ ID NO: 1321) | | |
| CEP290-475 | + | UCCUGUGAAAGGAUCUUAGAU | 21 | upstream |
| | | (SEQ ID NO: 1322) | | |
| CEP290-476 | + | UGUGAAAGGAUCUUAGAU (SEQ ID | 18 | upstream |
| | | NO: 1323) | | |
| CEP290-477 | − | UCCCUGGCUUUUGUUCCUUGGA | 22 | upstream |
| | | (SEQ ID NO: 1324) | | |
| CEP290-515 | − | UGGCUUUUGUUCCUUGGA (SEQ ID | 18 | upstream |
| | | NO: 1325) | | |
| CEP290-516 | − | UAUUUAUAGUGGCUGAAUGACUU | 23 | upstream |
| | | (SEQ ID NO: 1326) | | |
| CEP290-517 | − | UUUAUAGUGGCUGAAUGACUU | 21 | upstream |
| | | (SEQ ID NO: 1327) | | |
| CEP290-518 | − | UUAUAGUGGCUGAAUGACUU (SEQ | 20 | upstream |
| | | ID NO: 1328) | | |
| CEP290-519 | − | UAUAGUGGCUGAAUGACUU (SEQ | 19 | upstream |
| | | ID NO: 1329) | | |
| CEP290-520 | − | UGGUCCCUGGCUUUUGUUCCU (SEQ | 21 | upstream |
| | | ID NO: 1330) | | |
| CEP290-521 | − | UCCCUGGCUUUUGUUCCU (SEQ ID | 18 | upstream |
| | | NO: 1331) | | |
| CEP290-522 | − | UCUUGUGGAUAAUGUAUCA (SEQ | 19 | upstream |
| | | ID NO: 1332) | | |
| CEP290-523 | − | UCCUAGGCAAGAGACAUCUU (SEQ | 20 | upstream |
| | | ID NO: 887) | | |
| CEP290-524 | + | UUAGAUCUUAUUCUACUCCUGUGA | 24 | upstream |
| | | (SEQ ID NO: 1334) | | |
| CEP290-525 | + | UAGAUCUUAUUCUACUCCUGUGA | 23 | upstream |
| | | (SEQ ID NO: 1335) | | |
| CEP290-526 | + | UCUUAUUCUACUCCUGUGA (SEQ ID | 19 | upstream |
| | | NO: 1336) | | |
| CEP290-527 | − | UUAUCUAAGAUCCUUUCACAGGAG | 24 | upstream |
| | | (SEQ ID NO: 1337) | | |
| CEP290-528 | − | UAUCUAAGAUCCUUUCACAGGAG | 23 | upstream |
| | | (SEQ ID NO: 1338) | | |
| CEP290-529 | − | UCUAAGAUCCUUUCACAGGAG | 21 | upstream |
| | | (SEQ ID NO: 1339) | | |
| CEP290-530 | − | UAAGAUCCUUUCACAGGAG (SEQ ID | 19 | upstream |
| | | NO: 1340) | | |
| CEP290-531 | − | UUCCUCAUCAGAAAUAGAGGCUU | 23 | upstream |
| | | (SEQ ID NO: 1341) | | |
| CEP290-532 | − | UCCUCAUCAGAAAUAGAGGCUU | 22 | upstream |
| | | (SEQ ID NO: 1342) | | |
| CEP290-533 | − | UCAUCAGAAAUAGAGGCUU (SEQ ID | 19 | upstream |
| | | NO: 1343) | | |
| CEP290-534 | − | UUUCAGGAUUCCUACUAAAUU | 21 | upstream |
| | | (SEQ ID NO: 1344) | | |
| CEP290-535 | − | UUCAGGAUUCCUACUAAAUU (SEQ | 20 | upstream |
| | | ID NO: 904) | | |
| CEP290-536 | − | UCAGGAUUCCUACUAAAUU (SEQ ID | 19 | upstream |
| | | NO: 1346) | | |
| CEP290-537 | + | UUGUUCUGUCCUCAGUAAAAGGUA | 24 | upstream |
| | | (SEQ ID NO: 1347) | | |
| CEP290-538 | + | UGUUCUGUCCUCAGUAAAAGGUA | 23 | upstream |
| | | (SEQ ID NO: 1348) | | |
| CEP290-539 | + | UUCUGUCCUCAGUAAAAGGUA | 21 | upstream |
| | | (SEQ ID NO: 1349) | | |
| CEP290-540 | + | UCUGUCCUCAGUAAAAGGUA (SEQ | 20 | upstream |
| | | ID NO: 890) | | |
| CEP290-541 | + | UGUCCUCAGUAAAAGGUA (SEQ ID | 18 | upstream |
| | | NO: 1351) | | |
| CEP290-542 | + | UACUCAGAACAACGUUUUCAUUUA | 24 | upstream |
| | | (SEQ ID NO: 1352) | | |
| CEP290-543 | + | UCAGAACAACGUUUUCAUUUA | 21 | upstream |
| | | (SEQ ID NO: 1353) | | |
| CEP290-544 | − | UAGAAUAUCAUAAGUUACAAUCU | 23 | upstream |
| | | (SEQ ID NO: 1354) | | |
| CEP290-545 | − | UAUCAUAAGUUACAAUCU (SEQ ID | 18 | upstream |
| | | NO: 1355) | | |
| CEP290-546 | + | UCAAGUGGCUGUAAGAUAACUACA | 24 | upstream |
| | | (SEQ ID NO: 1356) | | |
| CEP290-547 | + | UGGCUGUAAGAUAACUACA (SEQ ID | 19 | upstream |
| | | NO: 1357) | | |
| CEP290-548 | − | UGUUUAACGUUAUCAUUUUCCCA | 23 | upstream |
| | | (SEQ ID NO: 1358) | | |
| CEP290-549 | − | UUUAACGUUAUCAUUUUCCCA | 21 | upstream |
| | | (SEQ ID NO: 1359) | | |
| CEP290-550 | − | UUAACGUUAUCAUUUUCCCA (SEQ | 20 | upstream |
| | | ID NO: 900) | | |
| CEP290-551 | − | UAACGUUAUCAUUUUCCCA (SEQ ID | 19 | upstream |
| | | NO: 1361) | | |
| CEP290-552 | + | UAAGAGAAAGGGAUGGGCACUUA | 23 | upstream |
| | | (SEQ ID NO: 1362) | | |
| CEP290-553 | − | UUCAGUAAAUGAAAACGUUGUU | 22 | upstream |
| | | (SEQ ID NO: 1363) | | |
| CEP290-554 | − | UCAGUAAAUGAAAACGUUGUU | 21 | upstream |
| | | (SEQ ID NO: 1364) | | |
| CEP290-555 | + | UAAACAUGACUCAUAAUUUAGU | 22 | upstream |
| | | (SEQ ID NO: 1365) | | |
| CEP290-556 | − | UAUUCUUAUCUAAGAUCCUUUCAC | 24 | upstream |
| | | (SEQ ID NO: 1366) | | |
| CEP290-557 | − | UUCUUAUCUAAGAUCCUUUCAC | 22 | upstream |
| | | (SEQ ID NO: 1367) | | |
| CEP290-558 | − | UCUUAUCUAAGAUCCUUUCAC (SEQ | 21 | upstream |
| | | ID NO: 1368) | | |
| CEP290-559 | − | UUAUCUAAGAUCCUUUCAC (SEQ ID | 19 | upstream |
| | | NO: 1369) | | |
| CEP290-560 | − | UAUCUAAGAUCCUUUCAC (SEQ ID | 18 | upstream |
| | | NO: 1370) | | |
| CEP290-561 | − | UCAGAAAUAGAGGCUUAUGGAUU | 23 | upstream |
| | | (SEQ ID NO: 1371) | | |
| CEP290-562 | + | UUCUGGGUACAGGGGUAAGAGAA | 23 | upstream |
| | | (SEQ ID NO: 1372) | | |
| CEP290-563 | + | UCUGGGUACAGGGGUAAGAGAA | 22 | upstream |
| | | (SEQ ID NO: 1373) | | |
| CEP290-564 | + | UGGGUACAGGGGUAAGAGAA (SEQ | 20 | upstream |
| | | ID NO: 1374) | | |
| CEP290-565 | − | UAUAUUAUCUAUUUAUAGUGG | 21 | upstream |
| | | (SEQ ID NO: 1375) | | |
| CEP290-566 | − | UAUUAUCUAUUUAUAGUGG (SEQ | 19 | upstream |
| | | ID NO: 1376) | | |
| CEP290-567 | − | UAAAUUCUCAUCAUUUUUUAUUG | 23 | upstream |
| | | (SEQ ID NO: 1377) | | |
| CEP290-568 | − | UUCUCAUCAUUUUUUAUUG (SEQ ID | 19 | upstream |
| | | NO: 1378) | | |
| CEP290-569 | − | UCUCAUCAUUUUUUAUUG (SEQ ID | 18 | upstream |
| | | NO: 1379) | | |
| CEP290-570 | − | UAGAAUAAAUGUAGAAUUUUAAUG | 24 | upstream |
| | | (SEQ ID NO: 1380) | | |
| CEP290-571 | − | UAAAUGUAGAAUUUUAAUG (SEQ | 19 | upstream |
| | | ID NO: 1381) | | |
| CEP290-572 | − | UCAUUUUUUAUUGUAGAAUAAAUG | 24 | upstream |
| | | (SEQ ID NO: 1382) | | |
| CEP290-573 | − | UUUUUUAUUGUAGAAUAAAUG | 21 | upstream |
| | | (SEQ ID NO: 1383) | | |
| CEP290-574 | − | UUUUUAUUGUAGAAUAAAUG (SEQ | 20 | upstream |
| | | ID NO: 1384) | | |
| CEP290-575 | − | UUUUAUUGUAGAAUAAAUG (SEQ | 19 | upstream |
| | | ID NO: 1385) | | |
| CEP290-576 | − | UUUAUUGUAGAAUAAAUG (SEQ ID | 18 | upstream |
| | | NO: 1386) | | |
| CEP290-577 | − | AAAAGCUACCGGUUACCUG (SEQ ID | 19 | downstream |
| | | NO: 1387) | | |
| CEP290-578 | − | AAAGCUACCGGUUACCUG (SEQ ID | 18 | downstream |
| | | NO: 1388) | | |
| CEP290-579 | + | AGUUUUUAAGGCGGGGAGUCACAU | 24 | downstream |
| | | (SEQ ID NO: 1389) | | |
| CEP290-580 | − | ACAUCCUCCUUACUGCCAC (SEQ ID | 19 | downstream |
| | | NO: 1390) | | |
| CEP290-581 | + | AGUCACAGGGUAGGAUUCAUGUU | 23 | downstream |
| | | (SEQ ID NO: 1391) | | |
| CEP290-582 | + | ACAGGGUAGGAUUCAUGUU (SEQ | 19 | downstream |
| | | ID NO: 1392) | | |
| CEP290-583 | − | ACAGAGUUCAAGCUAAUACAU | 21 | downstream |
| | | (SEQ ID NO: 1393) | | |
| CEP290-584 | − | AGAGUUCAAGCUAAUACAU (SEQ ID | 19 | downstream |
| | | NO: 1394) | | |
| CEP290-585 | + | AUAAGAUGCAGAACUAGUGUAGAC | 24 | downstream |
| | | (SEQ ID NO: 1395) | | |
| CEP290-586 | + | AAGAUGCAGAACUAGUGUAGAC | 22 | downstream |
| | | (SEQ ID NO: 1396) | | |
| CEP290-587 | + | AGAUGCAGAACUAGUGUAGAC | 21 | downstream |
| | | (SEQ ID NO: 1397) | | |
| CEP290-588 | + | AUGCAGAACUAGUGUAGAC (SEQ ID | 19 | downstream |
| | | NO: 1398) | | |
| CEP290-589 | − | AGUAUCUCCUGUUUGGCA (SEQ ID | 18 | downstream |
| | | NO: 1399) | | |
| CEP290-590 | − | ACGAAAAUCAGAUUUCAUGUGUG | 23 | downstream |
| | | (SEQ ID NO: 1400) | | |
| CEP290-591 | − | AAAAUCAGAUUUCAUGUGUG (SEQ | 20 | downstream |
| | | ID NO: 1401) | | |
| CEP290-592 | − | AAAUCAGAUUUCAUGUGUG (SEQ | 19 | downstream |
| | | ID NO: 1402) | | |
| CEP290-593 | − | AAUCAGAUUUCAUGUGUG (SEQ ID | 18 | downstream |
| | | NO: 1403) | | |
| CEP290-594 | − | ACAAGAAUGAUCAUUCUAAAC | 21 | downstream |
| | | (SEQ ID NO: 1404) | | |
| CEP290-595 | − | AAGAAUGAUCAUUCUAAAC (SEQ ID | 19 | downstream |
| | | NO: 1405) | | |
| CEP290-596 | − | AGAAUGAUCAUUCUAAAC (SEQ ID | 18 | downstream |
| | | NO: 1406) | | |
| CEP290-597 | + | AGGCGGGGAGUCACAUGGGAGUCA | 24 | downstream |
| | | (SEQ ID NO: 1407) | | |
| CEP290-598 | + | AGCUUUUGACAGUUUUUAAGGCG | 23 | downstream |
| | | (SEQ ID NO: 1408) | | |
| CEP290-599 | + | AAUGAUCAUUCUUGUGGCAGUAAG | 24 | downstream |
| | | (SEQ ID NO: 1409) | | |
| CEP290-600 | + | AUGAUCAUUCUUGUGGCAGUAAG | 23 | downstream |
| | | (SEQ ID NO: 1410) | | |
| CEP290-601 | + | AUCAUUCUUGUGGCAGUAAG (SEQ | 20 | downstream |
| | | ID NO: 833) | | |
| CEP290-602 | − | AUCUAGAGCAAGAGAUGAACUAG | 23 | downstream |
| | | (SEQ ID NO: 1412) | | |
| CEP290-603 | − | AGAGCAAGAGAUGAACUAG (SEQ | 19 | downstream |
| | | ID NO: 1413) | | |
| CEP290-604 | + | AAUGCCUGAACAAGUUUUGAAAC | 23 | downstream |
| | | (SEQ ID NO: 1414) | | |
| CEP290-605 | + | AUGCCUGAACAAGUUUUGAAAC | 22 | downstream |
| | | (SEQ ID NO: 1415) | | |
| CEP290-606 | − | AGAUUGAGGUAGAAUCAAGAA | 21 | downstream |
| | | (SEQ ID NO: 1416) | | |
| CEP290-607 | − | AUUGAGGUAGAAUCAAGAA (SEQ | 19 | downstream |
| | | ID NO: 1417) | | |
| CEP290-608 | + | AUGUAAGACUGGAGAUAGAGAC | 22 | downstream |
| | | (SEQ ID NO: 1418) | | |
| CEP290-609 | + | AAGACUGGAGAUAGAGAC (SEQ ID | 18 | downstream |
| | | NO: 1419) | | |
| CEP290-610 | + | AGUCACAUGGGAGUCACAGGG | 21 | downstream |
| | | (SEQ ID NO: 1420) | | |
| CEP290-611 | − | ACAUAUCUGUCUUCCUUAA (SEQ ID | 19 | downstream |
| | | NO: 1421) | | |
| CEP290-612 | − | AAAUCAGAUUUCAUGUGUGAAGAA | 24 | downstream |
| | | (SEQ ID NO: 1422) | | |
| CEP290-613 | − | AAUCAGAUUUCAUGUGUGAAGAA | 23 | downstream |
| | | (SEQ ID NO: 1423) | | |
| CEP290-614 | − | AUCAGAUUUCAUGUGUGAAGAA | 22 | downstream |
| | | (SEQ ID NO: 1424) | | |
| CEP290-615 | − | AGAUUUCAUGUGUGAAGAA (SEQ | 19 | downstream |
| | | ID NO: 1425) | | |
| CEP290-616 | + | AAAUAAAACUAAGACACUGCCAAU | 24 | downstream |
| | | (SEQ ID NO: 1025) | | |
| CEP290-617 | + | AAUAAAACUAAGACACUGCCAAU | 23 | downstream |
| | | (SEQ ID NO: 1026) | | |
| CEP290-618 | + | AUAAAACUAAGACACUGCCAAU | 22 | downstream |
| | | (SEQ ID NO: 1027) | | |
| CEP290-619 | + | AAAACUAAGACACUGCCAAU (SEQ | 20 | downstream |
| | | ID NO: 610) | | |
| CEP290-620 | + | AAACUAAGACACUGCCAAU (SEQ ID | 19 | downstream |
| | | NO: 1028) | | |
| CEP290-621 | + | AACUAAGACACUGCCAAU (SEQ ID | 18 | downstream |
| | | NO: 1029) | | |
| CEP290-622 | − | AACUAUUUAAUUUGUUUCUGUGUG | 24 | downstream |
| | | (SEQ ID NO: 1431) | | |
| CEP290-623 | − | ACUAUUUAAUUUGUUUCUGUGUG | 23 | downstream |
| | | (SEQ ID NO: 1432) | | |
| CEP290-624 | − | AUUUAAUUUGUUUCUGUGUG (SEQ | 20 | downstream |
| | | ID NO: 840) | | |
| CEP290-625 | − | CUGUCAAAAGCUACCGGUUACCUG | 24 | downstream |
| | | (SEQ ID NO: 1434) | | |
| CEP290-626 | − | CAAAAGCUACCGGUUACCUG (SEQ | 20 | downstream |
| | | ID NO: 755) | | |
| CEP290-627 | − | CUUACAUCCUCCUUACUGCCAC | 22 | downstream |
| | | (SEQ ID NO: 1436) | | |
| CEP290-628 | − | CAUCCUCCUUACUGCCAC (SEQ ID | 18 | downstream |
| | | NO: 1437) | | |
| CEP290-629 | + | CACAGGGUAGGAUUCAUGUU (SEQ | 20 | downstream |
| | | ID NO: 846) | | |
| CEP290-630 | + | CAGGGUAGGAUUCAUGUU (SEQ ID | 18 | downstream |
| | | NO: 1439) | | |
| CEP290-631 | − | CACAGAGUUCAAGCUAAUACAU | 22 | downstream |
| | | (SEQ ID NO: 1440) | | |
| CEP290-632 | − | CAGAGUUCAAGCUAAUACAU (SEQ | 20 | downstream |
| | | ID NO: 848) | | |
| CEP290-633 | − | CACGAAAAUCAGAUUUCAUGUGUG | 24 | downstream |
| | | (SEQ ID NO: 1442) | | |
| CEP290-634 | − | CGAAAAUCAGAUUUCAUGUGUG | 22 | downstream |
| | | (SEQ ID NO: 1443) | | |
| CEP290-635 | − | CCACAAGAAUGAUCAUUCUAAAC | 23 | downstream |
| | | (SEQ ID NO: 1444) | | |
| CEP290-636 | − | CACAAGAAUGAUCAUUCUAAAC | 22 | downstream |
| | | (SEQ ID NO: 1445) | | |
| CEP290-637 | − | CAAGAAUGAUCAUUCUAAAC (SEQ | 20 | downstream |
| | | ID NO: 844) | | |
| CEP290-638 | + | CGGGGAGUCACAUGGGAGUCA | 21 | downstream |
| | | (SEQ ID NO: 1447) | | |
| CEP290-639 | + | CUUUUGACAGUUUUUAAGGCG | 21 | downstream |
| | | (SEQ ID NO: 1448) | | |
| CEP290-640 | + | CAUUCUUGUGGCAGUAAG (SEQ ID | 18 | downstream |
| | | NO: 1449) | | |
| CEP290-641 | − | CAUCUAGAGCAAGAGAUGAACUAG | 24 | downstream |
| | | (SEQ ID NO: 1450) | | |
| CEP290-642 | − | CUAGAGCAAGAGAUGAACUAG | 21 | downstream |
| | | (SEQ ID NO: 1451) | | |
| CEP290-643 | + | CCUGAACAAGUUUUGAAAC (SEQ ID | 19 | downstream |
| | | NO: 1452) | | |
| CEP290-644 | + | CUGAACAAGUUUUGAAAC (SEQ ID | 18 | downstream |
| | | NO: 1453) | | |
| CEP290-645 | − | CUCUCUUCCAGUUGUUUUGCUCA | 23 | downstream |
| | | (SEQ ID NO: 1454) | | |
| CEP290-646 | − | CUCUUCCAGUUGUUUUGCUCA (SEQ | 21 | downstream |
| | | ID NO: 1455) | | |
| CEP290-647 | − | CUUCCAGUUGUUUUGCUCA (SEQ ID | 19 | downstream |
| | | NO: 1456) | | |
| CEP290-648 | + | CACAUGGGAGUCACAGGG (SEQ ID | 18 | downstream |
| | | NO: 1457) | | |
| CEP290-649 | − | CAUAUCUGUCUUCCUUAA (SEQ ID | 18 | downstream |
| | | NO: 1458) | | |
| CEP290-650 | − | CAGAUUUCAUGUGUGAAGAA (SEQ | 20 | downstream |
| | | ID NO: 1124) | | |
| CEP290-651 | − | CUAUUUAAUUUGUUUCUGUGUG | 22 | downstream |
| | | (SEQ ID NO: 1460) | | |
| CEP290-652 | − | UGUCAAAAGCUACCGGUUACCUG | 23 | downstream |
| | | (SEQ ID NO: 1461) | | |
| CEP290-653 | − | UCAAAAGCUACCGGUUACCUG (SEQ | 21 | downstream |
| | | ID NO: 1462) | | |
| CEP290-654 | + | UUUUUAAGGCGGGGAGUCACAU | 22 | downstream |
| | | (SEQ ID NO: 1463) | | |
| CEP290-655 | + | UUUUAAGGCGGGGAGUCACAU | 21 | downstream |
| | | (SEQ ID NO: 1464) | | |
| CEP290-656 | + | UUUAAGGCGGGGAGUCACAU (SEQ | 20 | downstream |
| | | ID NO: 619) | | |
| CEP290-657 | + | UUAAGGCGGGGAGUCACAU (SEQ ID | 19 | downstream |
| | | NO: 1466) | | |
| CEP290-658 | + | UAAGGCGGGGAGUCACAU (SEQ ID | 18 | downstream |
| | | NO: 1467) | | |
| CEP290-659 | − | UCUUACAUCCUCCUUACUGCCAC | 23 | downstream |
| | | (SEQ ID NO: 1468) | | |
| CEP290-660 | − | UUACAUCCUCCUUACUGCCAC (SEQ | 21 | downstream |
| | | ID NO: 1469) | | |
| CEP290-661 | − | UACAUCCUCCUUACUGCCAC (SEQ | 20 | downstream |
| | | ID NO: 875) | | |
| CEP290-662 | + | UCACAGGGUAGGAUUCAUGUU | 21 | downstream |
| | | (SEQ ID NO: 1471) | | |
| CEP290-663 | + | UAAGAUGCAGAACUAGUGUAGAC | 23 | downstream |
| | | (SEQ ID NO: 1472) | | |
| CEP290-664 | + | UGCAGAACUAGUGUAGAC (SEQ ID | 18 | downstream |
| | | NO: 1473) | | |
| CEP290-665 | − | UGUUGAGUAUCUCCUGUUUGGCA | 23 | downstream |
| | | (SEQ ID NO: 1474) | | |
| CEP290-666 | − | UUGAGUAUCUCCUGUUUGGCA | 21 | downstream |
| | | (SEQ ID NO: 1475) | | |
| CEP290-667 | − | UGAGUAUCUCCUGUUUGGCA (SEQ | 20 | downstream |
| | | ID NO: 895) | | |
| CEP290-668 | + | UAGCUUUUGACAGUUUUUAAGGCG | 24 | downstream |
| | | (SEQ ID NO: 1477) | | |
| CEP290-669 | + | UUUUGACAGUUUUUAAGGCG (SEQ | 20 | downstream |
| | | ID NO: 681) | | |
| CEP290-670 | + | UUUGACAGUUUUUAAGGCG (SEQ | 19 | downstream |
| | | ID NO: 1479) | | |
| CEP290-671 | + | UUGACAGUUUUUAAGGCG (SEQ ID | 18 | downstream |
| | | NO: 1480) | | |
| CEP290-672 | + | UGAUCAUUCUUGUGGCAGUAAG | 22 | downstream |
| | | (SEQ ID NO: 1481) | | |
| CEP290-673 | + | UCAUUCUUGUGGCAGUAAG (SEQ ID | 19 | downstream |
| | | NO: 1482) | | |
| CEP290-674 | − | UCUAGAGCAAGAGAUGAACUAG | 22 | downstream |
| | | (SEQ ID NO: 1483) | | |
| CEP290-675 | − | UAGAGCAAGAGAUGAACUAG (SEQ | 20 | downstream |
| | | ID NO: 878) | | |
| CEP290-676 | + | UAAUGCCUGAACAAGUUUUGAAAC | 24 | downstream |
| | | (SEQ ID NO: 1485) | | |
| CEP290-677 | + | UGCCUGAACAAGUUUUGAAAC | 21 | downstream |
| | | (SEQ ID NO: 1486) | | |
| CEP290-678 | − | UGUAGAUUGAGGUAGAAUCAAGAA | 24 | downstream |
| | | (SEQ ID NO: 1487) | | |
| CEP290-679 | − | UAGAUUGAGGUAGAAUCAAGAA | 22 | downstream |
| | | (SEQ ID NO: 1488) | | |
| CEP290-680 | − | UUGAGGUAGAAUCAAGAA (SEQ ID | 18 | downstream |
| | | NO: 1489) | | |
| CEP290-681 | + | UGUAAGACUGGAGAUAGAGAC | 21 | downstream |
| | | (SEQ ID NO: 1490) | | |
| CEP290-682 | + | UAAGACUGGAGAUAGAGAC (SEQ | 19 | downstream |
| | | ID NO: 1491) | | |
| CEP290-683 | − | UCUCUCUUCCAGUUGUUUUGCUCA | 24 | downstream |
| | | (SEQ ID NO: 1492) | | |
| CEP290-684 | − | UCUCUUCCAGUUGUUUUGCUCA | 22 | downstream |
| | | (SEQ ID NO: 1493) | | |
| CEP290-685 | − | UCUUCCAGUUGUUUUGCUCA (SEQ | 20 | downstream |
| | | ID NO: 893) | | |
| CEP290-686 | − | UUCCAGUUGUUUUGCUCA (SEQ ID | 18 | downstream |
| | | NO: 1495) | | |
| CEP290-687 | + | UCACAUGGGAGUCACAGGG (SEQ ID | 19 | downstream |
| | | NO: 1496) | | |
| CEP290-688 | − | UGUUUACAUAUCUGUCUUCCUUAA | 24 | downstream |
| | | (SEQ ID NO: 1497) | | |
| CEP290-689 | − | UUUACAUAUCUGUCUUCCUUAA | 22 | downstream |
| | | (SEQ ID NO: 1498) | | |
| CEP290-690 | − | UUACAUAUCUGUCUUCCUUAA | 21 | downstream |
| | | (SEQ ID NO: 1499) | | |
| CEP290-691 | − | UACAUAUCUGUCUUCCUUAA (SEQ | 20 | downstream |
| | | ID NO: 689) | | |
| CEP290-692 | − | UCAGAUUUCAUGUGUGAAGAA | 21 | downstream |
| | | (SEQ ID NO: 1501) | | |
| CEP290-693 | + | UAAAACUAAGACACUGCCAAU | 21 | downstream |
| | | (SEQ ID NO: 1035) | | |
| CEP290-694 | − | UAUUUAAUUUGUUUCUGUGUG | 21 | downstream |
| | | (SEQ ID NO: 1503) | | |
| CEP290-695 | − | UUUAAUUUGUUUCUGUGUG (SEQ | 19 | downstream |
| | | ID NO: 1504) | | |
| CEP290-696 | − | UUAAUUUGUUUCUGUGUG (SEQ ID | 18 | downstream |
| | | NO: 1505) | | |

[0921] Table 9C provides targeting domains for break-induced deletion of genomic sequence including the mutation at the LCA10 target position in the CEP290 gene selected according to the third tier parameters. The targeting domains are within 1000 bp upstream of an Alu repeat, within 40 bp upstream of mutation, or 1000 bp downstream of the mutation, start with G and PAM is NNGRRT. It is contemplated herein that the targeting domain hybridizes to the target domain through complementary base pairing. Any of the targeting domains in the table can be used with a S. aureus Cas9 molecule that generates a double stranded break (Cas9 nuclease) or a single-stranded break (Cas9 nickase).

TABLE 9C

| | | | Target | Position |
|---|---|---|---|---|
| | DNA | | Site | relative to |
| gRNA Name | Strand | Targeting Domain | Length | mutation |
| CEP290-697 | − | GUAGAAUAAAUUUAUUUAAUG | 21 | upstream |
| | | (SEQ ID NO: 1506) | | |
| CEP290-495 | − | GAAUAAAUUUAUUUAAUG (SEQ ID | 18 | upstream |
| | | NO: 1507) | | |
| CEP290-698 | − | GAGAAAAAGGAGCAUGAAACAGG | 23 | upstream |
| | | (SEQ ID NO: 1508) | | |
| CEP290-699 | − | GAAAAAGGAGCAUGAAACAGG | 21 | upstream |
| | | (SEQ ID NO: 1509) | | |
| CEP290-700 | − | GUAGAAUAAAAAAUAAAAAAAC | 22 | upstream |
| | | (SEQ ID NO: 1510) | | |
| CEP290-701 | − | GAAUAAAAAAUAAAAAAAC (SEQ | 19 | upstream |
| | | ID NO: 1511) | | |
| CEP290-702 | − | GAAUAAAAAAUAAAAAAACUAGAG | 24 | upstream |
| | | (SEQ ID NO: 1512) | | |
| CEP290-508 | − | GAAAUAGAUGUAGAUUGAGG (SEQ | 20 | downstream |
| | | ID NO: 1513) | | |
| CEP290-703 | − | GAUAAUAAGGAAAUACAAAAA | 21 | downstream |
| | | (SEQ ID NO: 1514) | | |
| CEP290-704 | − | GUGUUGCCCAGGCUGGAGUGCAG | 23 | downstream |
| | | (SEQ ID NO: 1515) | | |
| CEP290-705 | − | GUUGCCCAGGCUGGAGUGCAG | 21 | downstream |
| | | (SEQ ID NO: 1516) | | |
| CEP290-706 | − | GCCCAGGCUGGAGUGCAG (SEQ ID | 18 | downstream |
| | | NO: 1517) | | |
| CEP290-707 | − | GUUGUUUUUUUUUUUGAAA (SEQ | 19 | downstream |
| | | ID NO: 1518) | | |
| CEP290-708 | − | GAGUCUCACUGUGUUGCCCAGGC | 23 | downstream |
| | | (SEQ ID NO: 1519) | | |
| CEP290-709 | − | GUCUCACUGUGUUGCCCAGGC (SEQ | 21 | downstream |
| | | ID NO: 1520) | | |

[0922] Table 9D provides targeting domains for break-induced deletion of genomic sequence including the mutation at the LCA10 target position in the CEP290 gene selected according to the fourth tier parameters. The targeting domains are within 1000 bp upstream of an Alu repeat, within 40 bp upstream of mutation, or 1000 bp downstream of the mutation and PAM is NNGRRT. It is contemplated herein that the targeting domain hybridizes to the target domain through complementary base pairing. Any of the targeting domains in the table can be used with a S. aureus Cas9 molecule that generates a double stranded break (Cas9 nuclease) or a single-stranded break (Cas9 nickase).

TABLE 9D

| | | | Target | Position |
|---|---|---|---|---|
| | DNA | | Site | relative to |
| gRNA Name | Strand | Targeting Domain | Length | mutation |
| CEP290-710 | − | AAUGUAGAAUAAAUUUAUUUAAUG | 24 | upstream |
| | | (SEQ ID NO: 1521) | | |
| CEP290-711 | − | AUGUAGAAUAAAUUUAUUUAAUG | 23 | upstream |
| | | (SEQ ID NO: 1522) | | |
| CEP290-712 | − | AGAAUAAAUUUAUUUAAUG (SEQ | 19 | upstream |
| | | ID NO: 1523) | | |
| CEP290-713 | + | AUUUAUUCUACAAUAAAAAAUGAU | 24 | upstream |
| | | (SEQ ID NO: 1524) | | |
| CEP290-714 | + | AUUCUACAAUAAAAAAUGAU (SEQ | 20 | upstream |
| | | ID NO: 1525) | | |
| CEP290-715 | − | AGAGAAAAAGGAGCAUGAAACAGG | 24 | upstream |
| | | (SEQ ID NO: 1526) | | |
| CEP290-716 | − | AGAAAAAGGAGCAUGAAACAGG | 22 | upstream |
| | | (SEQ ID NO: 1527) | | |
| CEP290-717 | − | AAAAAGGAGCAUGAAACAGG (SEQ | 20 | upstream |
| | | ID NO: 1528) | | |
| CEP290-718 | − | AAAAGGAGCAUGAAACAGG (SEQ | 19 | upstream |
| | | ID NO: 1529) | | |
| CEP290-719 | − | AAAGGAGCAUGAAACAGG (SEQ ID | 18 | upstream |
| | | NO: 1530) | | |
| CEP290-720 | + | ACAAUAAAAAAUGAUGAGAAUUUA | 24 | upstream |
| | | (SEQ ID NO: 1531) | | |
| CEP290-721 | + | AAUAAAAAAUGAUGAGAAUUUA | 22 | upstream |
| | | (SEQ ID NO: 1532) | | |
| CEP290-722 | + | AUAAAAAAUGAUGAGAAUUUA | 21 | upstream |
| | | (SEQ ID NO: 1533) | | |
| CEP290-723 | + | AAAAAAUGAUGAGAAUUUA (SEQ | 19 | upstream |
| | | ID NO: 1534) | | |
| CEP290-724 | + | AAAAAUGAUGAGAAUUUA (SEQ ID | 18 | upstream |
| | | NO: 1535) | | |
| CEP290-725 | − | AUGUAGAAUAAAAAAUAAAAAAAC | 24 | upstream |
| | | (SEQ ID NO: 1536) | | |
| CEP290-726 | − | AGAAUAAAAAAUAAAAAAAC (SEQ | 20 | upstream |
| | | ID NO: 1537) | | |
| CEP290-727 | − | AAUAAAAAAUAAAAAAAC (SEQ ID | 18 | upstream |
| | | NO: 1538) | | |
| CEP290-728 | − | AAUAAAAAAUAAAAAAACUAGAG | 23 | upstream |
| | | (SEQ ID NO: 1539) | | |
| CEP290-729 | − | AUAAAAAAUAAAAAAACUAGAG | 22 | upstream |
| | | (SEQ ID NO: 1540) | | |
| CEP290-730 | − | AAAAAAUAAAAAAACUAGAG (SEQ | 20 | upstream |
| | | ID NO: 1541) | | |
| CEP290-731 | − | AAAAAUAAAAAAACUAGAG (SEQ | 19 | upstream |
| | | ID NO: 1542) | | |
| CEP290-732 | − | AAAAUAAAAAAACUAGAG (SEQ ID | 18 | upstream |
| | | NO: 1543) | | |
| CEP290-733 | + | CAAUAAAAAAUGAUGAGAAUUUA | 23 | upstream |
| | | (SEQ ID NO: 1544) | | |
| CEP290-734 | − | UGUAGAAUAAAUUUAUUUAAUG | 22 | upstream |
| | | (SEQ ID NO: 1545) | | |
| CEP290-735 | − | UAGAAUAAAUUUAUUUAAUG (SEQ | 20 | upstream |
| | | ID NO: 1546) | | |
| CEP290-736 | + | UUUAUUCUACAAUAAAAAAUGAU | 23 | upstream |
| | | (SEQ ID NO: 1547) | | |
| CEP290-737 | + | UUAUUCUACAAUAAAAAAUGAU | 22 | upstream |
| | | (SEQ ID NO: 1548) | | |
| CEP290-738 | + | UAUUCUACAAUAAAAAAUGAU | 21 | upstream |
| | | (SEQ ID NO: 1549) | | |
| CEP290-739 | + | UUCUACAAUAAAAAAUGAU (SEQ | 19 | upstream |
| | | ID NO: 1550) | | |
| CEP290-740 | + | UCUACAAUAAAAAAUGAU (SEQ ID | 18 | upstream |
| | | NO: 1551) | | |
| CEP290-741 | + | UAAAAAAUGAUGAGAAUUUA (SEQ | 20 | upstream |
| | | ID NO: 1552) | | |
| CEP290-742 | − | UGUAGAAUAAAAAAUAAAAAAAC | 23 | upstream |
| | | (SEQ ID NO: 1553) | | |
| CEP290-743 | − | UAGAAUAAAAAAUAAAAAAAC | 21 | upstream |
| | | (SEQ ID NO: 1554) | | |
| CEP290-744 | − | UAAAAAAUAAAAAAACUAGAG | 21 | upstream |
| | | (SEQ ID NO: 1555) | | |
| CEP290-745 | − | AAAAGAAAUAGAUGUAGAUUGAGG | 24 | downstream |
| | | (SEQ ID NO: 1556) | | |
| CEP290-746 | − | AAAGAAAUAGAUGUAGAUUGAGG | 23 | downstream |
| | | (SEQ ID NO: 1557) | | |
| CEP290-747 | − | AAGAAAUAGAUGUAGAUUGAGG | 22 | downstream |
| | | (SEQ ID NO: 1558) | | |
| CEP290-748 | − | AGAAAUAGAUGUAGAUUGAGG | 21 | downstream |
| | | (SEQ ID NO: 1559) | | |
| CEP290-749 | − | AAAUAGAUGUAGAUUGAGG (SEQ | 19 | downstream |
| | | ID NO: 1560) | | |
| CEP290-750 | − | AAUAGAUGUAGAUUGAGG (SEQ ID | 18 | downstream |
| | | NO: 1561) | | |
| CEP290-751 | − | AUAAUAAGGAAAUACAAAAACUGG | 24 | downstream |
| | | (SEQ ID NO: 1562) | | |
| CEP290-752 | − | AAUAAGGAAAUACAAAAACUGG | 22 | downstream |
| | | (SEQ ID NO: 1563) | | |
| CEP290-753 | − | AUAAGGAAAUACAAAAACUGG | 21 | downstream |
| | | (SEQ ID NO: 1564) | | |
| CEP290-754 | − | AAGGAAAUACAAAAACUGG (SEQ | 19 | downstream |
| | | ID NO: 1565) | | |
| CEP290-755 | − | AGGAAAUACAAAAACUGG (SEQ ID | 18 | downstream |
| | | NO: 1566) | | |
| CEP290-756 | − | AUAGAUAAUAAGGAAAUACAAAAA | 24 | downstream |
| | | (SEQ ID NO: 1567) | | |
| CEP290-757 | − | AGAUAAUAAGGAAAUACAAAAA | 22 | downstream |
| | | (SEQ ID NO: 1568) | | |
| CEP290-758 | − | AUAAUAAGGAAAUACAAAAA (SEQ | 20 | downstream |
| | | ID NO: 1569) | | |
| CEP290-759 | − | AAUAAGGAAAUACAAAAA (SEQ ID | 18 | downstream |
| | | NO: 1570) | | |
| CEP290-760 | + | AAAAAAAAAAACAACAAAAA (SEQ | 20 | downstream |
| | | ID NO: 1571) | | |
| CEP290-761 | + | AAAAAAAAAACAACAAAAA (SEQ | 19 | downstream |
| | | ID NO: 1572) | | |
| CEP290-762 | + | AAAAAAAAACAACAAAAA (SEQ ID | 18 | downstream |
| | | NO: 1573) | | |
| CEP290-763 | − | AGAGUCUCACUGUGUUGCCCAGGC | 24 | downstream |
| | | (SEQ ID NO: 1574) | | |
| CEP290-764 | − | AGUCUCACUGUGUUGCCCAGGC | 22 | downstream |
| | | (SEQ ID NO: 1575) | | |
| CEP290-765 | + | CAAAAAAAAAAACAACAAAAA | 21 | downstream |
| | | (SEQ ID NO: 1576) | | |
| CEP290-766 | − | CUCACUGUGUUGCCCAGGC (SEQ ID | 19 | downstream |
| | | NO: 1577) | | |
| CEP290-767 | − | UAAUAAGGAAAUACAAAAACUGG | 23 | downstream |
| | | (SEQ ID NO: 1578) | | |
| CEP290-768 | − | UAAGGAAAUACAAAAACUGG (SEQ | 20 | downstream |
| | | ID NO: 1579) | | |
| CEP290-769 | − | UAGAUAAUAAGGAAAUACAAAAA | 23 | downstream |
| | | (SEQ ID NO: 1580) | | |
| CEP290-770 | − | UAAUAAGGAAAUACAAAAA (SEQ | 19 | downstream |
| | | ID NO: 1581) | | |
| CEP290-771 | − | UGUGUUGCCCAGGCUGGAGUGCAG | 24 | downstream |
| | | (SEQ ID NO: 1582) | | |
| CEP290-772 | − | UGUUGCCCAGGCUGGAGUGCAG | 22 | downstream |
| | | (SEQ ID NO: 1583) | | |
| CEP290-773 | − | UUGCCCAGGCUGGAGUGCAG (SEQ | 20 | downstream |
| | | ID NO: 1189) | | |
| CEP290-774 | − | UGCCCAGGCUGGAGUGCAG (SEQ ID | 19 | downstream |
| | | NO: 1585) | | |
| CEP290-775 | + | UUUCAAAAAAAAAAACAACAAAAA | 24 | downstream |
| | | (SEQ ID NO: 1586) | | |
| CEP290-776 | + | UUCAAAAAAAAAAACAACAAAAA | 23 | downstream |
| | | (SEQ ID NO: 1587) | | |
| CEP290-777 | + | UCAAAAAAAAAAACAACAAAAA | 22 | downstream |
| | | (SEQ ID NO: 1588) | | |
| CEP290-778 | − | UUUUUGUUGUUUUUUUUUUUGAAA | 24 | downstream |
| | | (SEQ ID NO: 1589) | | |
| CEP290-779 | − | UUUUGUUGUUUUUUUUUUUGAAA | 23 | downstream |
| | | (SEQ ID NO: 1590) | | |
| CEP290-780 | − | UUUGUUGUUUUUUUUUUUGAAA | 22 | downstream |
| | | (SEQ ID NO: 1591) | | |
| CEP290-781 | − | UUGUUGUUUUUUUUUUUGAAA | 21 | downstream |
| | | (SEQ ID NO: 1592) | | |
| CEP290-782 | − | UGUUGUUUUUUUUUUUGAAA (SEQ | 20 | downstream |
| | | ID NO: 1593) | | |
| CEP290-783 | − | UUGUUUUUUUUUUUGAAA (SEQ ID | 18 | downstream |
| | | NO: 1594) | | |
| CEP290-784 | − | UCUCACUGUGUUGCCCAGGC (SEQ | 20 | downstream |
| | | ID NO: 1182) | | |
| CEP290-785 | − | UCACUGUGUUGCCCAGGC (SEQ ID | 18 | downstream |
| | | NO: 1596) | | |

[0923] Table 9E provides targeting domains for break-induced deletion of genomic sequence including the mutation at the LCA10 target position in the CEP290 gene selected according to the fifth tier parameters. The targeting domains are within 1000 bp upstream of an Alu repeat, within 40 bp upstream of mutation, or 1000 bp downstream of the mutation and PAM is NNGRRV. It is contemplated herein that the targeting domain hybridizes to the target domain through complementary base pairing. Any of the targeting domains in the table can be used with a S. aureus Cas9 molecule that generates a double stranded break (Cas9 nuclease) or a single-stranded break (Cas9 nickase).

TABLE 9E

| | | | Target | Position |
|---|---|---|---|---|
| | DNA | | Site | relative to |
| gRNA Name | Strand | Targeting Domain | Length | mutation |
| CEP290-786 | + | ACUGUUGGCUACAUCCAUUCC (SEQ ID | 21 | upstream |
| | | NO: 1597) | | |
| CEP290-787 | + | AAUUUACAGAGUGCAUCCAUGGUC | 24 | upstream |
| | | (SEQ ID NO: 1598) | | |
| CEP290-788 | + | AUUUACAGAGUGCAUCCAUGGUC (SEQ | 23 | upstream |
| | | ID NO: 1599) | | |
| CEP290-789 | + | ACAGAGUGCAUCCAUGGUC (SEQ ID | 19 | upstream |
| | | NO: 1600) | | |
| CEP290-790 | − | AGCAUUAGAAAGUCCUAGGC (SEQ ID | 20 | upstream |
| | | NO: 823) | | |
| CEP290-791 | − | AUGGUCCCUGGCUUUUGUUCC (SEQ ID | 21 | upstream |
| | | NO: 1602) | | |
| CEP290-792 | − | AUAGAGACACAUUCAGUAA (SEQ ID | 19 | upstream |
| | | NO: 1603) | | |
| CEP290-793 | − | AGCUCAAAAGCUUUUGCUGGCUCA | 24 | upstream |
| | | (SEQ ID NO: 1604) | | |
| CEP290-794 | − | AAAAGCUUUUGCUGGCUCA (SEQ ID | 19 | upstream |
| | | NO: 1605) | | |
| CEP290-795 | − | AAAGCUUUUGCUGGCUCA (SEQ ID NO: | 18 | upstream |
| | | 1606) | | |
| CEP290-796 | + | AAUCCAUAAGCCUCUAUUUCUGAU | 24 | upstream |
| | | (SEQ ID NO: 1607) | | |
| CEP290-797 | + | AUCCAUAAGCCUCUAUUUCUGAU (SEQ | 23 | upstream |
| | | ID NO: 1608) | | |
| CEP290-798 | + | AUAAGCCUCUAUUUCUGAU (SEQ ID | 19 | upstream |
| | | NO: 1609) | | |
| CEP290-799 | + | AGCUAAAUCAUGCAAGUGACCUA (SEQ | 23 | upstream |
| | | ID NO: 1610) | | |
| CEP290-800 | + | AAAUCAUGCAAGUGACCUA (SEQ ID | 19 | upstream |
| | | NO: 1611) | | |
| CEP290-801 | + | AAUCAUGCAAGUGACCUA (SEQ ID NO: | 18 | upstream |
| | | 1612) | | |
| CEP290-802 | − | AAACCUCUUUUAACCAGACAUCU (SEQ | 23 | upstream |
| | | ID NO: 1613) | | |
| CEP290-803 | − | AACCUCUUUUAACCAGACAUCU (SEQ | 22 | upstream |
| | | ID NO: 1614) | | |
| CEP290-804 | − | ACCUCUUUUAACCAGACAUCU (SEQ ID | 21 | upstream |
| | | NO: 1615) | | |
| CEP290-805 | + | AGUUUGUUCUGGGUACAGGGGUAA | 24 | upstream |
| | | (SEQ ID NO: 1616) | | |
| CEP290-806 | + | AUGACUCAUAAUUUAGUAGGAAUC | 24 | upstream |
| | | (SEQ ID NO: 1617) | | |
| CEP290-807 | + | ACUCAUAAUUUAGUAGGAAUC (SEQ ID | 21 | upstream |
| | | NO: 1618) | | |
| CEP290-808 | − | AAUGGAUGUAGCCAACAGUAG (SEQ ID | 21 | upstream |
| | | NO: 1619) | | |
| CEP290-809 | − | AUGGAUGUAGCCAACAGUAG (SEQ ID | 20 | upstream |
| | | NO: 1620) | | |
| CEP290-810 | + | AUCACCUCUCUUUGGCAAAAGCAG | 24 | upstream |
| | | (SEQ ID NO: 1621) | | |
| CEP290-811 | + | ACCUCUCUUUGGCAAAAGCAG (SEQ ID | 21 | upstream |
| | | NO: 1622) | | |
| CEP290-812 | − | AGGUAGAAUAUUGUAAUCAAAGG | 23 | upstream |
| | | (SEQ ID NO: 1623) | | |
| CEP290-813 | − | AGAAUAUUGUAAUCAAAGG (SEQ ID | 19 | upstream |
| | | NO: 1624) | | |
| CEP290-814 | + | AAGGAACAAAAGCCAGGGACC (SEQ ID | 21 | upstream |
| | | NO: 1625) | | |
| CEP290-815 | + | AGGAACAAAAGCCAGGGACC (SEQ ID | 20 | upstream |
| | | NO: 1626) | | |
| CEP290-816 | + | ACAUCCAUUCCAAGGAACAAAAGC | 24 | upstream |
| | | (SEQ ID NO: 1627) | | |
| CEP290-817 | + | AUCCAUUCCAAGGAACAAAAGC (SEQ | 22 | upstream |
| | | ID NO: 1628) | | |
| CEP290-818 | + | AUUCCAAGGAACAAAAGC (SEQ ID NO: | 18 | upstream |
| | | 1629) | | |
| CEP290-819 | + | AGAAUUAGAUCUUAUUCUACUCCU | 24 | upstream |
| | | (SEQ ID NO: 1630) | | |
| CEP290-820 | + | AAUUAGAUCUUAUUCUACUCCU (SEQ | 22 | upstream |
| | | ID NO: 1631) | | |
| CEP290-821 | + | AUUAGAUCUUAUUCUACUCCU (SEQ ID | 21 | upstream |
| | | NO: 1632) | | |
| CEP290-822 | + | AGAUCUUAUUCUACUCCU (SEQ ID NO: | 18 | upstream |
| | | 1633) | | |
| CEP290-823 | − | AUUUGUUCAUCUUCCUCAU (SEQ ID | 19 | upstream |
| | | NO: 1634) | | |
| CEP290-824 | − | AGAGGUGAUUAUGUUACUUUUUA | 23 | upstream |
| | | (SEQ ID NO: 1635) | | |
| CEP290-825 | − | AGGUGAUUAUGUUACUUUUUA (SEQ | 21 | upstream |
| | | ID NO: 1636) | | |
| CEP290-826 | − | AACCUCUUUUAACCAGACAUCUAA | 24 | upstream |
| | | (SEQ ID NO: 1637) | | |
| CEP290-827 | − | ACCUCUUUUAACCAGACAUCUAA (SEQ | 23 | upstream |
| | | ID NO: 1638) | | |
| CEP290-828 | + | AUAAACAUGACUCAUAAUUUAG (SEQ | 22 | upstream |
| | | ID NO: 1639) | | |
| CEP290-829 | + | AAACAUGACUCAUAAUUUAG (SEQ ID | 20 | upstream |
| | | NO: 805) | | |
| CEP290-830 | + | AACAUGACUCAUAAUUUAG (SEQ ID | 19 | upstream |
| | | NO: 1641) | | |
| CEP290-831 | + | ACAUGACUCAUAAUUUAG (SEQ ID NO: | 18 | upstream |
| | | 1642) | | |
| CEP290-832 | − | ACAGGUAGAAUAUUGUAAUCAAAG | 24 | upstream |
| | | (SEQ ID NO: 1643) | | |
| CEP290-833 | − | AGGUAGAAUAUUGUAAUCAAAG (SEQ | 22 | upstream |
| | | ID NO: 1644) | | |
| CEP290-834 | − | AGAAUAUUGUAAUCAAAG (SEQ ID NO: | 18 | upstream |
| | | 1645) | | |
| CEP290-835 | + | AUAGUUUGUUCUGGGUACAGGGGU | 24 | upstream |
| | | (SEQ ID NO: 1646) | | |
| CEP290-836 | + | AGUUUGUUCUGGGUACAGGGGU (SEQ | 22 | upstream |
| | | ID NO: 1647) | | |
| CEP290-837 | − | AGACAUCUAAGAGAAAAAGGAGC | 23 | upstream |
| | | (SEQ ID NO: 1648) | | |
| CEP290-838 | − | ACAUCUAAGAGAAAAAGGAGC (SEQ ID | 21 | upstream |
| | | NO: 1649) | | |
| CEP290-839 | − | AUCUAAGAGAAAAAGGAGC (SEQ ID | 19 | upstream |
| | | NO: 1650) | | |
| CEP290-840 | + | AGAGGAUAGGACAGAGGACA (SEQ ID | 20 | upstream |
| | | NO: 735) | | |
| CEP290-841 | + | AGGAUAGGACAGAGGACA (SEQ ID NO: | 18 | upstream |
| | | 1652) | | |
| CEP290-842 | + | AGGAAAGAUGAAAAAUACUCUU (SEQ | 22 | upstream |
| | | ID NO: 1653) | | |
| CEP290-843 | + | AAAGAUGAAAAAUACUCUU (SEQ ID | 19 | upstream |
| | | NO: 1654) | | |
| CEP290-844 | + | AAGAUGAAAAAUACUCUU (SEQ ID NO: | 18 | upstream |
| | | 1655) | | |
| CEP290-845 | + | AGGAAAGAUGAAAAAUACUCUUU | 23 | upstream |
| | | (SEQ ID NO: 1656) | | |
| CEP290-846 | + | AAAGAUGAAAAAUACUCUUU (SEQ ID | 20 | upstream |
| | | NO: 737) | | |
| CEP290-847 | + | AAGAUGAAAAAUACUCUUU (SEQ ID | 19 | upstream |
| | | NO: 1658) | | |
| CEP290-848 | + | AGAUGAAAAAUACUCUUU (SEQ ID NO: | 18 | upstream |
| | | 1659) | | |
| CEP290-849 | + | AGGAAAGAUGAAAAAUACUCU (SEQ ID | 21 | upstream |
| | | NO: 1660) | | |
| CEP290-850 | + | AAAGAUGAAAAAUACUCU (SEQ ID NO: | 18 | upstream |
| | | 1661) | | |
| CEP290-851 | + | AUAGGACAGAGGACAUGGAGAA (SEQ | 22 | upstream |
| | | ID NO: 1662) | | |
| CEP290-852 | + | AGGACAGAGGACAUGGAGAA (SEQ ID | 20 | upstream |
| | | NO: 736) | | |
| CEP290-853 | + | AGGAUAGGACAGAGGACAUGGAGA | 24 | upstream |
| | | (SEQ ID NO: 1664) | | |
| CEP290-854 | + | AUAGGACAGAGGACAUGGAGA (SEQ ID | 21 | upstream |
| | | NO: 1665) | | |
| CEP290-855 | + | AGGACAGAGGACAUGGAGA (SEQ ID | 19 | upstream |
| | | NO: 1666) | | |
| CEP290-856 | + | AAGGAACAAAAGCCAGGGACCAU (SEQ | 23 | upstream |
| | | ID NO: 1667) | | |
| CEP290-857 | + | AGGAACAAAAGCCAGGGACCAU (SEQ | 22 | upstream |
| | | ID NO: 1668) | | |
| CEP290-858 | + | AACAAAAGCCAGGGACCAU (SEQ ID | 19 | upstream |
| | | NO: 1669) | | |
| CEP290-859 | + | ACAAAAGCCAGGGACCAU (SEQ ID NO: | 18 | upstream |
| | | 1670) | | |
| CEP290-860 | + | ACAUUUAUUCUACAAUAAAAAAUG | 24 | upstream |
| | | (SEQ ID NO: 1671) | | |
| CEP290-861 | + | AUUUAUUCUACAAUAAAAAAUG (SEQ | 22 | upstream |
| | | ID NO: 1672) | | |
| CEP290-862 | + | AUUCUACAAUAAAAAAUG (SEQ ID NO: | 18 | upstream |
| | | 1673) | | |
| CEP290-863 | + | AUUGUGUGUGUGUGUGUGUGUUAU | 24 | upstream |
| | | (SEQ ID NO: 1674) | | |
| CEP290-864 | + | CUACUGUUGGCUACAUCCAUUCC (SEQ | 23 | upstream |
| | | ID NO: 1675) | | |
| CEP290-865 | + | CUGUUGGCUACAUCCAUUCC (SEQ ID | 20 | upstream |
| | | NO: 1676) | | |
| CEP290-866 | + | CAGAGUGCAUCCAUGGUC (SEQ ID NO: | 18 | upstream |
| | | 1677) | | |
| CEP290-867 | − | CUCCAGCAUUAGAAAGUCCUAGGC | 24 | upstream |
| | | (SEQ ID NO: 1678) | | |
| CEP290-868 | − | CCAGCAUUAGAAAGUCCUAGGC (SEQ | 22 | upstream |
| | | ID NO: 1679) | | |
| CEP290-869 | − | CAGCAUUAGAAAGUCCUAGGC (SEQ ID | 21 | upstream |
| | | NO: 1680) | | |
| CEP290-870 | − | CAUUAGAAAGUCCUAGGC (SEQ ID NO: | 18 | upstream |
| | | 1681) | | |
| CEP290-871 | − | CCCAUGGUCCCUGGCUUUUGUUCC | 24 | upstream |
| | | (SEQ ID NO: 1682) | | |
| CEP290-872 | − | CCAUGGUCCCUGGCUUUUGUUCC (SEQ | 23 | upstream |
| | | ID NO: 1683) | | |
| CEP290-873 | − | CAUGGUCCCUGGCUUUUGUUCC (SEQ | 22 | upstream |
| | | ID NO: 1684) | | |
| CEP290-874 | − | CUCAUAGAGACACAUUCAGUAA (SEQ | 22 | upstream |
| | | ID NO: 1685) | | |
| CEP290-875 | − | CAUAGAGACACAUUCAGUAA (SEQ ID | 20 | upstream |
| | | NO: 750) | | |
| CEP290-876 | − | CUCAAAAGCUUUUGCUGGCUCA (SEQ | 22 | upstream |
| | | ID NO: 1687) | | |
| CEP290-877 | − | CAAAAGCUUUUGCUGGCUCA (SEQ ID | 20 | upstream |
| | | NO: 762) | | |
| CEP290-878 | + | CCAUAAGCCUCUAUUUCUGAU (SEQ ID | 21 | upstream |
| | | NO: 1689) | | |
| CEP290-879 | + | CAUAAGCCUCUAUUUCUGAU (SEQ ID | 20 | upstream |
| | | NO: 851) | | |
| CEP290-880 | + | CAGCUAAAUCAUGCAAGUGACCUA | 24 | upstream |
| | | (SEQ ID NO: 1691) | | |
| CEP290-881 | + | CUAAAUCAUGCAAGUGACCUA (SEQ ID | 21 | upstream |
| | | NO: 1692) | | |
| CEP290-882 | − | CAAACCUCUUUUAACCAGACAUCU | 24 | upstream |
| | | (SEQ ID NO: 1693) | | |
| CEP290-883 | − | CCUCUUUUAACCAGACAUCU (SEQ ID | 20 | upstream |
| | | NO: 1694) | | |
| CEP290-884 | − | CUCUUUUAACCAGACAUCU (SEQ ID | 19 | upstream |
| | | NO: 1695) | | |
| CEP290-885 | + | CUCAUAAUUUAGUAGGAAUC (SEQ ID | 20 | upstream |
| | | NO: 864) | | |
| CEP290-886 | + | CAUAAUUUAGUAGGAAUC (SEQ ID NO: | 18 | upstream |
| | | 1697) | | |
| CEP290-887 | + | CACCUCUCUUUGGCAAAAGCAG (SEQ | 22 | upstream |
| | | ID NO: 1698) | | |
| CEP290-888 | + | CCUCUCUUUGGCAAAAGCAG (SEQ ID | 20 | upstream |
| | | NO: 859) | | |
| CEP290-889 | + | CUCUCUUUGGCAAAAGCAG (SEQ ID | 19 | upstream |
| | | NO: 1700) | | |
| CEP290-890 | − | CAGGUAGAAUAUUGUAAUCAAAGG | 24 | upstream |
| | | (SEQ ID NO: 1701) | | |
| CEP290-891 | + | CCAAGGAACAAAAGCCAGGGACC (SEQ | 23 | upstream |
| | | ID NO: 1702) | | |
| CEP290-892 | + | CAAGGAACAAAAGCCAGGGACC (SEQ | 22 | upstream |
| | | ID NO: 1703) | | |
| CEP290-893 | + | CAUCCAUUCCAAGGAACAAAAGC (SEQ | 23 | upstream |
| | | ID NO: 1704) | | |
| CEP290-894 | + | CCAUUCCAAGGAACAAAAGC (SEQ ID | 20 | upstream |
| | | NO: 1705) | | |
| CEP290-895 | + | CAUUCCAAGGAACAAAAGC (SEQ ID | 19 | upstream |
| | | NO: 1706) | | |
| CEP290-896 | + | CUCUUGCCUAGGACUUUCUAAUGC | 24 | upstream |
| | | (SEQ ID NO: 1707) | | |
| CEP290-897 | + | CUUGCCUAGGACUUUCUAAUGC (SEQ | 22 | upstream |
| | | ID NO: 1708) | | |
| CEP290-898 | + | CCUAGGACUUUCUAAUGC (SEQ ID NO: | 18 | upstream |
| | | 1709) | | |
| CEP290-899 | − | CCUGAUUUGUUCAUCUUCCUCAU (SEQ | 23 | upstream |
| | | ID NO: 1710) | | |
| CEP290-900 | − | CUGAUUUGUUCAUCUUCCUCAU (SEQ | 22 | upstream |
| | | ID NO: 1711) | | |
| CEP290-901 | − | CCUCUUUUAACCAGACAUCUAA (SEQ | 22 | upstream |
| | | ID NO: 1712) | | |
| CEP290-902 | − | CUCUUUUAACCAGACAUCUAA (SEQ ID | 21 | upstream |
| | | NO: 1713) | | |
| CEP290-903 | − | CUUUUAACCAGACAUCUAA (SEQ ID | 19 | upstream |
| | | NO: 1714) | | |
| CEP290-904 | − | CCUCUGUCCUAUCCUCUCCAGCAU | 24 | upstream |
| | | (SEQ ID NO: 1715) | | |
| CEP290-905 | − | CUCUGUCCUAUCCUCUCCAGCAU (SEQ | 23 | upstream |
| | | ID NO: 1716) | | |
| CEP290-906 | − | CUGUCCUAUCCUCUCCAGCAU (SEQ ID | 21 | upstream |
| | | NO: 1717) | | |
| CEP290-907 | − | CAGGUAGAAUAUUGUAAUCAAAG | 23 | upstream |
| | | (SEQ ID NO: 1718) | | |
| CEP290-908 | + | CUGGGUACAGGGGUAAGAGA (SEQ ID | 20 | upstream |
| | | NO: 1719) | | |
| CEP290-909 | − | CUUUCUGCUGCUUUUGCCA (SEQ ID | 19 | upstream |
| | | NO: 1720) | | |
| CEP290-910 | − | CAGACAUCUAAGAGAAAAAGGAGC | 24 | upstream |
| | | (SEQ ID NO: 1721) | | |
| CEP290-911 | − | CAUCUAAGAGAAAAAGGAGC (SEQ ID | 20 | upstream |
| | | NO: 1722) | | |
| CEP290-912 | + | CUGGAGAGGAUAGGACAGAGGACA | 24 | upstream |
| | | (SEQ ID NO: 1723) | | |
| CEP290-913 | + | CAAGGAACAAAAGCCAGGGACCAU | 24 | upstream |
| | | (SEQ ID NO: 1724) | | |
| CEP290-914 | + | CAUUUAUUCUACAAUAAAAAAUG | 23 | upstream |
| | | (SEQ ID NO: 1725) | | |
| CEP290-915 | + | GCUACUGUUGGCUACAUCCAUUCC | 24 | upstream |
| | | (SEQ ID NO: 1726) | | |
| CEP290-916 | + | GUUGGCUACAUCCAUUCC (SEQ ID NO: | 18 | upstream |
| | | 1727) | | |
| CEP290-917 | − | GCAUUAGAAAGUCCUAGGC (SEQ ID | 19 | upstream |
| | | NO: 1728) | | |
| CEP290-918 | − | GGUCCCUGGCUUUUGUUCC (SEQ ID | 19 | upstream |
| | | NO: 1729) | | |
| CEP290-919 | − | GUCCCUGGCUUUUGUUCC (SEQ ID NO: | 18 | upstream |
| | | 1730) | | |
| CEP290-920 | − | GGCUCAUAGAGACACAUUCAGUAA | 24 | upstream |
| | | (SEQ ID NO: 1731) | | |
| CEP290-921 | − | GCUCAUAGAGACACAUUCAGUAA (SEQ | 23 | upstream |
| | | ID NO: 1732) | | |
| CEP290-922 | − | GCUCAAAAGCUUUUGCUGGCUCA (SEQ | 23 | upstream |
| | | ID NO: 1733) | | |
| CEP290-923 | + | GCUAAAUCAUGCAAGUGACCUA (SEQ | 22 | upstream |
| | | ID NO: 1734) | | |
| CEP290-924 | + | GUUUGUUCUGGGUACAGGGGUAA | 23 | upstream |
| | | (SEQ ID NO: 1735) | | |
| CEP290-925 | + | GUUCUGGGUACAGGGGUAA (SEQ ID | 19 | upstream |
| | | NO: 1736) | | |
| CEP290-926 | + | GACUCAUAAUUUAGUAGGAAUC (SEQ | 22 | upstream |
| | | ID NO: 1737) | | |
| CEP290-927 | − | GGAAUGGAUGUAGCCAACAGUAG | 23 | upstream |
| | | (SEQ ID NO: 1738) | | |
| CEP290-928 | − | GAAUGGAUGUAGCCAACAGUAG (SEQ | 22 | upstream |
| | | ID NO: 1739) | | |
| CEP290-929 | − | GGAUGUAGCCAACAGUAG (SEQ ID NO: | 18 | upstream |
| | | 1740) | | |
| CEP290-930 | − | GGUAGAAUAUUGUAAUCAAAGG (SEQ | 22 | upstream |
| | | ID NO: 1741) | | |
| CEP290-931 | − | GUAGAAUAUUGUAAUCAAAGG (SEQ | 21 | upstream |
| | | ID NO: 1742) | | |
| CEP290-932 | − | GAAUAUUGUAAUCAAAGG (SEQ ID NO: | 18 | upstream |
| | | 1743) | | |
| CEP290-933 | + | GGAACAAAAGCCAGGGACC (SEQ ID | 19 | upstream |
| | | NO: 1744) | | |
| CEP290-934 | + | GAACAAAAGCCAGGGACC (SEQ ID NO: | 18 | upstream |
| | | 1745) | | |
| CEP290-935 | + | GAAUUAGAUCUUAUUCUACUCCU (SEQ | 23 | upstream |
| | | ID NO: 1746) | | |
| CEP290-936 | + | GCCUAGGACUUUCUAAUGC (SEQ ID | 19 | upstream |
| | | NO: 1747) | | |
| CEP290-937 | − | GAUUUGUUCAUCUUCCUCAU (SEQ ID | 20 | upstream |
| | | NO: 774) | | |
| CEP290-938 | − | GAGAGGUGAUUAUGUUACUUUUUA | 24 | upstream |
| | | (SEQ ID NO: 1749) | | |
| CEP290-939 | − | GAGGUGAUUAUGUUACUUUUUA (SEQ | 22 | upstream |
| | | ID NO: 1750) | | |
| CEP290-940 | − | GGUGAUUAUGUUACUUUUUA (SEQ ID | 20 | upstream |
| | | NO: 780) | | |
| CEP290-941 | − | GUGAUUAUGUUACUUUUUA (SEQ ID | 19 | upstream |
| | | NO: 1752) | | |
| CEP290-942 | − | GUCCUAUCCUCUCCAGCAU (SEQ ID | 19 | upstream |
| | | NO: 1753) | | |
| CEP290-943 | + | GAUAAACAUGACUCAUAAUUUAG | 23 | upstream |
| | | (SEQ ID NO: 1754) | | |
| CEP290-944 | − | GGUAGAAUAUUGUAAUCAAAG (SEQ | 21 | upstream |
| | | ID NO: 1755) | | |
| CEP290-945 | − | GUAGAAUAUUGUAAUCAAAG (SEQ ID | 20 | upstream |
| | | NO: 1756) | | |
| CEP290-946 | + | GUUCUGGGUACAGGGGUAAGAGA | 23 | upstream |
| | | (SEQ ID NO: 1757) | | |
| CEP290-947 | + | GGGUACAGGGGUAAGAGA (SEQ ID NO: | 18 | upstream |
| | | 1758) | | |
| CEP290-948 | + | GUUUGUUCUGGGUACAGGGGU (SEQ ID | 21 | upstream |
| | | NO: 1759) | | |
| CEP290-949 | − | GUUUGCUUUCUGCUGCUUUUGCCA | 24 | upstream |
| | | (SEQ ID NO: 1760) | | |
| CEP290-950 | − | GCUUUCUGCUGCUUUUGCCA (SEQ ID | 20 | upstream |
| | | NO: 776) | | |
| CEP290-951 | − | GACAUCUAAGAGAAAAAGGAGC (SEQ | 22 | upstream |
| | | ID NO: 1762) | | |
| CEP290-952 | + | GGAGAGGAUAGGACAGAGGACA (SEQ | 22 | upstream |
| | | ID NO: 1763) | | |
| CEP290-953 | + | GAGAGGAUAGGACAGAGGACA (SEQ ID | 21 | upstream |
| | | NO: 1764) | | |
| CEP290-954 | + | GAGGAUAGGACAGAGGACA (SEQ ID | 19 | upstream |
| | | NO: 1765) | | |
| CEP290-955 | + | GGAAAGAUGAAAAAUACUCUU (SEQ ID | 21 | upstream |
| | | NO: 1766) | | |
| CEP290-956 | + | GAAAGAUGAAAAAUACUCUU (SEQ ID | 20 | upstream |
| | | NO: 462) | | |
| CEP290-957 | + | GGAAAGAUGAAAAAUACUCUUU (SEQ | 22 | upstream |
| | | ID NO: 1767) | | |
| CEP290-958 | + | GAAAGAUGAAAAAUACUCUUU (SEQ ID | 21 | upstream |
| | | NO: 1768) | | |
| CEP290-959 | + | GGAAAGAUGAAAAAUACUCU (SEQ ID | 20 | upstream |
| | | NO: 778) | | |
| CEP290-960 | + | GAAAGAUGAAAAAUACUCU (SEQ ID | 19 | upstream |
| | | NO: 1770) | | |
| CEP290-961 | + | GGAUAGGACAGAGGACAUGGAGAA | 24 | upstream |
| | | (SEQ ID NO: 1771) | | |
| CEP290-962 | + | GAUAGGACAGAGGACAUGGAGAA | 23 | upstream |
| | | (SEQ ID NO: 1772) | | |
| CEP290-963 | + | GGACAGAGGACAUGGAGAA (SEQ ID | 19 | upstream |
| | | NO: 1773) | | |
| CEP290-964 | + | GACAGAGGACAUGGAGAA (SEQ ID NO: | 18 | upstream |
| | | 1774) | | |
| CEP290-965 | + | GGAUAGGACAGAGGACAUGGAGA | 23 | upstream |
| | | (SEQ ID NO: 1775) | | |
| CEP290-966 | + | GAUAGGACAGAGGACAUGGAGA (SEQ | 22 | upstream |
| | | ID NO: 1776) | | |
| CEP290-967 | + | GGACAGAGGACAUGGAGA (SEQ ID NO: | 18 | upstream |
| | | 1777) | | |
| CEP290-968 | + | GGAACAAAAGCCAGGGACCAU (SEQ ID | 21 | upstream |
| | | NO: 1778) | | |
| CEP290-969 | + | GAACAAAAGCCAGGGACCAU (SEQ ID | 20 | upstream |
| | | NO: 465) | | |
| CEP290-970 | + | GUGUGUGUGUGUGUGUGUUAU (SEQ | 21 | upstream |
| | | ID NO: 1779) | | |
| CEP290-971 | + | GUGUGUGUGUGUGUGUUAU (SEQ ID | 19 | upstream |
| | | NO: 1780) | | |
| CEP290-972 | + | GUGUGUGUGUGUGUGUGUUAUG (SEQ | 22 | upstream |
| | | ID NO: 1781) | | |
| CEP290-973 | + | GUGUGUGUGUGUGUGUUAUG (SEQ ID | 20 | upstream |
| | | NO: 1154) | | |
| CEP290-974 | + | GUGUGUGUGUGUGUUAUG (SEQ ID NO: | 18 | upstream |
| | | 1783) | | |
| CEP290-975 | + | UACUGUUGGCUACAUCCAUUCC (SEQ | 22 | upstream |
| | | ID NO: 1784) | | |
| CEP290-976 | + | UGUUGGCUACAUCCAUUCC (SEQ ID | 19 | upstream |
| | | NO: 1785) | | |
| CEP290-977 | + | UUUACAGAGUGCAUCCAUGGUC (SEQ | 22 | upstream |
| | | ID NO: 1786) | | |
| CEP290-978 | + | UUACAGAGUGCAUCCAUGGUC (SEQ ID | 21 | upstream |
| | | NO: 1787) | | |
| CEP290-979 | + | UACAGAGUGCAUCCAUGGUC (SEQ ID | 20 | upstream |
| | | NO: 1788) | | |
| CEP290-980 | − | UCCAGCAUUAGAAAGUCCUAGGC (SEQ | 23 | upstream |
| | | ID NO: 1789) | | |
| CEP290-981 | − | UGGUCCCUGGCUUUUGUUCC (SEQ ID | 20 | upstream |
| | | NO: 1790) | | |
| CEP290-982 | − | UCAUAGAGACACAUUCAGUAA (SEQ ID | 21 | upstream |
| | | NO: 1791) | | |
| CEP290-983 | − | UAGAGACACAUUCAGUAA (SEQ ID NO: | 18 | upstream |
| | | 1792) | | |
| CEP290-984 | − | UCAAAAGCUUUUGCUGGCUCA (SEQ ID | 21 | upstream |
| | | NO: 1793) | | |
| CEP290-985 | + | UCCAUAAGCCUCUAUUUCUGAU (SEQ | 22 | upstream |
| | | ID NO: 1794) | | |
| CEP290-986 | + | UAAGCCUCUAUUUCUGAU (SEQ ID NO: | 18 | upstream |
| | | 1795) | | |
| CEP290-987 | + | UAAAUCAUGCAAGUGACCUA (SEQ ID | 20 | upstream |
| | | NO: 508) | | |
| CEP290-988 | − | UCUUUUAACCAGACAUCU (SEQ ID NO: | 18 | upstream |
| | | 1796) | | |
| CEP290-989 | + | UUUGUUCUGGGUACAGGGGUAA (SEQ | 22 | upstream |
| | | ID NO: 1797) | | |
| CEP290-990 | + | UUGUUCUGGGUACAGGGGUAA (SEQ ID | 21 | upstream |
| | | NO: 1798) | | |
| CEP290-991 | + | UGUUCUGGGUACAGGGGUAA (SEQ ID | 20 | upstream |
| | | NO: 1799) | | |
| CEP290-992 | + | UUCUGGGUACAGGGGUAA (SEQ ID NO: | 18 | upstream |
| | | 1800) | | |
| CEP290-993 | + | UGACUCAUAAUUUAGUAGGAAUC | 23 | upstream |
| | | (SEQ ID NO: 1801) | | |
| CEP290-994 | + | UCAUAAUUUAGUAGGAAUC (SEQ ID | 19 | upstream |
| | | NO: 1802) | | |
| CEP290-995 | − | UGGAAUGGAUGUAGCCAACAGUAG | 24 | upstream |
| | | (SEQ ID NO: 1803) | | |
| CEP290-996 | − | UGGAUGUAGCCAACAGUAG (SEQ ID | 19 | upstream |
| | | NO: 1804) | | |
| CEP290-997 | + | UCACCUCUCUUUGGCAAAAGCAG (SEQ | 23 | upstream |
| | | ID NO: 1805) | | |
| CEP290-998 | + | UCUCUUUGGCAAAAGCAG (SEQ ID NO: | 18 | upstream |
| | | 1806) | | |
| CEP290-999 | − | UAGAAUAUUGUAAUCAAAGG (SEQ ID | 20 | upstream |
| | | NO: 1807) | | |
| CEP290- | + | UCCAAGGAACAAAAGCCAGGGACC | 24 | upstream |
| 1000 | | (SEQ ID NO: 1808) | | |
| CEP290- | + | UCCAUUCCAAGGAACAAAAGC (SEQ ID | 21 | upstream |
| 1001 | | NO: 1809) | | |
| CEP290- | + | UUAGAUCUUAUUCUACUCCU (SEQ ID | 20 | upstream |
| 1002 | | NO: 902) | | |
| CEP290- | + | UAGAUCUUAUUCUACUCCU (SEQ ID | 19 | upstream |
| 1003 | | NO: 1811) | | |
| CEP290- | + | UCUUGCCUAGGACUUUCUAAUGC (SEQ | 23 | upstream |
| 1004 | | ID NO: 1812) | | |
| CEP290- | + | UUGCCUAGGACUUUCUAAUGC (SEQ ID | 21 | upstream |
| 1005 | | NO: 1813) | | |
| CEP290- | + | UGCCUAGGACUUUCUAAUGC (SEQ ID | 20 | upstream |
| 1006 | | NO: 632) | | |
| CEP290- | − | UCCUGAUUUGUUCAUCUUCCUCAU | 24 | upstream |
| 1007 | | (SEQ ID NO: 1814) | | |
| CEP290- | − | UGAUUUGUUCAUCUUCCUCAU (SEQ ID | 21 | upstream |
| 1008 | | NO: 1815) | | |
| CEP290- | − | UUUGUUCAUCUUCCUCAU (SEQ ID NO: | 18 | upstream |
| 1009 | | 1816) | | |
| CEP290- | − | UGAUUAUGUUACUUUUUA (SEQ ID NO: | 18 | upstream |
| 1010 | | 1817) | | |
| CEP290- | − | UCUUUUAACCAGACAUCUAA (SEQ ID | 20 | upstream |
| 1011 | | NO: 1818) | | |
| CEP290- | − | UUUUAACCAGACAUCUAA (SEQ ID NO: | 18 | upstream |
| 1012 | | 1819) | | |
| CEP290- | − | UCUGUCCUAUCCUCUCCAGCAU (SEQ | 22 | upstream |
| 1013 | | ID NO: 1820) | | |
| CEP290- | − | UGUCCUAUCCUCUCCAGCAU (SEQ ID | 20 | upstream |
| 1014 | | NO: 899) | | |
| CEP290- | − | UCCUAUCCUCUCCAGCAU (SEQ ID NO: | 18 | upstream |
| 1015 | | 1822) | | |
| CEP290- | + | UGAUAAACAUGACUCAUAAUUUAG | 24 | upstream |
| 1016 | | (SEQ ID NO: 1823) | | |
| CEP290- | + | UAAACAUGACUCAUAAUUUAG (SEQ ID | 21 | upstream |
| 1017 | | NO: 1824) | | |
| CEP290- | − | UAGAAUAUUGUAAUCAAAG (SEQ ID | 19 | upstream |
| 1018 | | NO: 1825) | | |
| CEP290- | + | UGUUCUGGGUACAGGGGUAAGAGA | 24 | upstream |
| 1019 | | (SEQ ID NO: 1826) | | |
| CEP290- | + | UUCUGGGUACAGGGGUAAGAGA (SEQ | 22 | upstream |
| 1020 | | ID NO: 1827) | | |
| CEP290- | + | UCUGGGUACAGGGGUAAGAGA (SEQ ID | 21 | upstream |
| 1021 | | NO: 1828) | | |
| CEP290- | + | UGGGUACAGGGGUAAGAGA (SEQ ID | 19 | upstream |
| 1022 | | NO: 1829) | | |
| CEP290- | + | UAGUUUGUUCUGGGUACAGGGGU | 23 | upstream |
| 1023 | | (SEQ ID NO: 1830) | | |
| CEP290- | + | UUUGUUCUGGGUACAGGGGU (SEQ ID | 20 | upstream |
| 1024 | | NO: 1831) | | |
| CEP290- | + | UUGUUCUGGGUACAGGGGU (SEQ ID | 19 | upstream |
| 1025 | | NO: 1832) | | |
| CEP290- | + | UGUUCUGGGUACAGGGGU (SEQ ID NO: | 18 | upstream |
| 1026 | | 1833) | | |
| CEP290- | − | UUUGCUUUCUGCUGCUUUUGCCA (SEQ | 23 | upstream |
| 1027 | | ID NO: 1834) | | |
| CEP290- | − | UUGCUUUCUGCUGCUUUUGCCA (SEQ | 22 | upstream |
| 1028 | | ID NO: 1835) | | |
| CEP290- | − | UGCUUUCUGCUGCUUUUGCCA (SEQ ID | 21 | upstream |
| 1029 | | NO: 1836) | | |
| CEP290- | − | UUUCUGCUGCUUUUGCCA (SEQ ID NO: | 18 | upstream |
| 1030 | | 1837) | | |
| CEP290- | − | UCUAAGAGAAAAAGGAGC (SEQ ID NO: | 18 | upstream |
| 1031 | | 1838) | | |
| CEP290- | + | UGGAGAGGAUAGGACAGAGGACA | 23 | upstream |
| 1032 | | (SEQ ID NO: 1839) | | |
| CEP290- | + | UUAGGAAAGAUGAAAAAUACUCUU | 24 | upstream |
| 1033 | | (SEQ ID NO: 1840) | | |
| CEP290- | + | UAGGAAAGAUGAAAAAUACUCUU | 23 | upstream |
| 1034 | | (SEQ ID NO: 1841) | | |
| CEP290- | + | UAGGAAAGAUGAAAAAUACUCUUU | 24 | upstream |
| 1035 | | (SEQ ID NO: 1842) | | |
| CEP290- | + | UUUAGGAAAGAUGAAAAAUACUCU | 24 | upstream |
| 1036 | | (SEQ ID NO: 1843) | | |
| CEP290- | + | UUAGGAAAGAUGAAAAAUACUCU | 23 | upstream |
| 1037 | | (SEQ ID NO: 1844) | | |
| CEP290- | + | UAGGAAAGAUGAAAAAUACUCU (SEQ | 22 | upstream |
| 1038 | | ID NO: 1845) | | |
| CEP290- | + | UAGGACAGAGGACAUGGAGAA (SEQ ID | 21 | upstream |
| 1039 | | NO: 1846) | | |
| CEP290- | + | UAGGACAGAGGACAUGGAGA (SEQ ID | 20 | upstream |
| 1040 | | NO: 881) | | |
| CEP290- | + | UUUAUUCUACAAUAAAAAAUG (SEQ ID | 21 | upstream |
| 1041 | | NO: 1848) | | |
| CEP290- | + | UUAUUCUACAAUAAAAAAUG (SEQ ID | 20 | upstream |
| 1042 | | NO: 1849) | | |
| CEP290- | + | UAUUCUACAAUAAAAAAUG (SEQ ID | 19 | upstream |
| 1043 | | NO: 1850) | | |
| CEP290- | + | UUGUGUGUGUGUGUGUGUGUUAU | 23 | upstream |
| 1044 | | (SEQ ID NO: 1851) | | |
| CEP290- | + | UGUGUGUGUGUGUGUGUGUUAU (SEQ | 22 | upstream |
| 1045 | | ID NO: 1852) | | |
| CEP290- | + | UGUGUGUGUGUGUGUGUUAU (SEQ ID | 20 | upstream |
| 1046 | | NO: 1853) | | |
| CEP290- | + | UGUGUGUGUGUGUGUUAU (SEQ ID NO: | 18 | upstream |
| 1047 | | 1854) | | |
| CEP290- | + | UUGUGUGUGUGUGUGUGUGUUAUG | 24 | upstream |
| 1048 | | (SEQ ID NO: 1855) | | |
| CEP290- | + | UGUGUGUGUGUGUGUGUGUUAUG | 23 | upstream |
| 1049 | | (SEQ ID NO: 1856) | | |
| CEP290- | + | UGUGUGUGUGUGUGUGUUAUG (SEQ | 21 | upstream |
| 1050 | | ID NO: 1857) | | |
| CEP290- | + | UGUGUGUGUGUGUGUUAUG (SEQ ID | 19 | upstream |
| 1051 | | NO: 1858) | | |
| CEP290- | + | ACUGUUGGCUACAUCCAUUCCA (SEQ | 22 | upstream |
| 1052 | | ID NO: 1859) | | |
| CEP290- | + | AUUAUCCACAAGAUGUCUCUUGCC | 24 | upstream |
| 1053 | | (SEQ ID NO: 1860) | | |
| CEP290- | + | AUCCACAAGAUGUCUCUUGCC (SEQ ID | 21 | upstream |
| 1054 | | NO: 1861) | | |
| CEP290- | + | AUGAGCCAGCAAAAGCUU (SEQ ID NO: | 18 | upstream |
| 1055 | | 1862) | | |
| CEP290- | + | ACAGAGUGCAUCCAUGGUCCAGG (SEQ | 23 | upstream |
| 1056 | | ID NO: 1863) | | |
| CEP290- | + | AGAGUGCAUCCAUGGUCCAGG (SEQ ID | 21 | upstream |
| 1057 | | NO: 1864) | | |
| CEP290- | + | AGUGCAUCCAUGGUCCAGG (SEQ ID | 19 | upstream |
| 1058 | | NO: 1865) | | |
| CEP290- | − | AGCUGAAAUAUUAAGGGCUCUUC (SEQ | 23 | upstream |
| 1059 | | ID NO: 1866) | | |
| CEP290- | − | AAAUAUUAAGGGCUCUUC (SEQ ID NO: | 18 | upstream |
| 1060 | | 1867) | | |
| CEP290- | − | AACUCUAUACCUUUUACUGAGGA (SEQ | 23 | upstream |
| 1061 | | ID NO: 1868) | | |
| CEP290- | − | ACUCUAUACCUUUUACUGAGGA (SEQ | 22 | upstream |
| 1062 | | ID NO: 1869) | | |
| CEP290- | − | ACUUGAACUCUAUACCUUUUACU (SEQ | 23 | upstream |
| 1063 | | ID NO: 1870) | | |
| CEP290- | − | AACUCUAUACCUUUUACU (SEQ ID NO: | 18 | upstream |
| 1064 | | 1871) | | |
| CEP290- | + | AGUAGGAAUCCUGAAAGCUACU (SEQ | 22 | upstream |
| 1065 | | ID NO: 1872) | | |
| CEP290- | + | AGGAAUCCUGAAAGCUACU (SEQ ID | 19 | upstream |
| 1066 | | NO: 1873) | | |
| CEP290- | − | AGCCAACAGUAGCUGAAAUAUU (SEQ | 22 | upstream |
| 1067 | | ID NO: 1874) | | |
| CEP290- | − | AACAGUAGCUGAAAUAUU (SEQ ID NO: | 18 | upstream |
| 1068 | | 1875) | | |
| CEP290- | + | AUCCAUUCCAAGGAACAAAAGCC (SEQ | 23 | upstream |
| 1069 | | ID NO: 1876) | | |
| CEP290- | + | AUUCCAAGGAACAAAAGCC (SEQ ID | 19 | upstream |
| 1070 | | NO: 1877) | | |
| CEP290- | − | AUCCCUUUCUCUUACCCCUGUACC | 24 | upstream |
| 1071 | | (SEQ ID NO: 1878) | | |
| CEP290- | + | AGGACUUUCUAAUGCUGGAGAGGA | 24 | upstream |
| 1072 | | (SEQ ID NO: 1879) | | |
| CEP290- | + | ACUUUCUAAUGCUGGAGAGGA (SEQ ID | 21 | upstream |
| 1073 | | NO: 1880) | | |
| CEP290- | + | AAUGCUGGAGAGGAUAGGACA (SEQ ID | 21 | upstream |
| 1074 | | NO: 1881) | | |
| CEP290- | + | AUGCUGGAGAGGAUAGGACA (SEQ ID | 20 | upstream |
| 1075 | | NO: 838) | | |
| CEP290- | − | AUCAUAAGUUACAAUCUGUGAAU | 23 | upstream |
| 1076 | | (SEQ ID NO: 1883) | | |
| CEP290- | − | AUAAGUUACAAUCUGUGAAU (SEQ ID | 20 | upstream |
| 1077 | | NO: 1884) | | |
| CEP290- | − | AAGUUACAAUCUGUGAAU (SEQ ID NO: | 18 | upstream |
| 1078 | | 1885) | | |
| CEP290- | − | AACCAGACAUCUAAGAGAAAA (SEQ ID | 21 | upstream |
| 1079 | | NO: 1886) | | |
| CEP290- | − | ACCAGACAUCUAAGAGAAAA (SEQ ID | 20 | upstream |
| 1080 | | NO: 1087) | | |
| CEP290- | + | AAGCCUCUAUUUCUGAUGAGGAAG | 24 | upstream |
| 1081 | | (SEQ ID NO: 1888) | | |
| CEP290- | + | AGCCUCUAUUUCUGAUGAGGAAG (SEQ | 23 | upstream |
| 1082 | | ID NO: 1889) | | |
| CEP290- | + | AUGAGGAAGAUGAACAAAUC (SEQ ID | 20 | upstream |
| 1083 | | NO: 733) | | |
| CEP290- | + | AUUUACUGAAUGUGUCUCU (SEQ ID | 19 | upstream |
| 1084 | | NO: 1891) | | |
| CEP290- | + | ACAGGGGUAAGAGAAAGGG (SEQ ID | 19 | upstream |
| 1085 | | NO: 1892) | | |
| CEP290- | + | CUACUGUUGGCUACAUCCAUUCCA | 24 | upstream |
| 1086 | | (SEQ ID NO: 1893) | | |
| CEP290- | + | CUGUUGGCUACAUCCAUUCCA (SEQ ID | 21 | upstream |
| 1087 | | NO: 1894) | | |
| CEP290- | + | CCACAAGAUGUCUCUUGCC (SEQ ID | 19 | upstream |
| 1088 | | NO: 1895) | | |
| CEP290- | + | CACAAGAUGUCUCUUGCC (SEQ ID NO: | 18 | upstream |
| 1089 | | 1896) | | |
| CEP290- | − | CCUUUGUAGUUAUCUUACAGCCAC | 24 | upstream |
| 1090 | | (SEQ ID NO: 1897) | | |
| CEP290- | − | CUUUGUAGUUAUCUUACAGCCAC (SEQ | 23 | upstream |
| 1091 | | ID NO: 1898) | | |
| CEP290- | + | CUCUAUGAGCCAGCAAAAGCUU (SEQ | 22 | upstream |
| 1092 | | ID NO: 1899) | | |
| CEP290- | + | CUAUGAGCCAGCAAAAGCUU (SEQ ID | 20 | upstream |
| 1093 | | NO: 748) | | |
| CEP290- | + | CAGAGUGCAUCCAUGGUCCAGG (SEQ | 22 | upstream |
| 1094 | | ID NO: 1901) | | |
| CEP290- | − | CUGAAAUAUUAAGGGCUCUUC (SEQ ID | 21 | upstream |
| 1095 | | NO: 1902) | | |
| CEP290- | − | CUCUAUACCUUUUACUGAGGA (SEQ ID | 21 | upstream |
| 1096 | | NO: 1903) | | |
| CEP290- | − | CUAUACCUUUUACUGAGGA (SEQ ID | 19 | upstream |
| 1097 | | NO: 1904) | | |
| CEP290- | − | CACUUGAACUCUAUACCUUUUACU | 24 | upstream |
| 1098 | | (SEQ ID NO: 1905) | | |
| CEP290- | − | CUUGAACUCUAUACCUUUUACU (SEQ | 22 | upstream |
| 1099 | | ID NO: 1906) | | |
| CEP290- | − | CCAACAGUAGCUGAAAUAUU (SEQ ID | 20 | upstream |
| 1100 | | NO: 1907) | | |
| CEP290- | − | CAACAGUAGCUGAAAUAUU (SEQ ID | 19 | upstream |
| 1101 | | NO: 1908) | | |
| CEP290- | + | CAUCCAUUCCAAGGAACAAAAGCC | 24 | upstream |
| 1102 | | (SEQ ID NO: 1909) | | |
| CEP290- | + | CCAUUCCAAGGAACAAAAGCC (SEQ ID | 21 | upstream |
| 1103 | | NO: 1910) | | |
| CEP290- | + | CAUUCCAAGGAACAAAAGCC (SEQ ID | 20 | upstream |
| 1104 | | NO: 1131) | | |
| CEP290- | − | CCCUUUCUCUUACCCCUGUACC (SEQ | 22 | upstream |
| 1105 | | ID NO: 1912) | | |
| CEP290- | − | CCUUUCUCUUACCCCUGUACC (SEQ ID | 21 | upstream |
| 1106 | | NO: 1913) | | |
| CEP290- | − | CUUUCUCUUACCCCUGUACC (SEQ ID | 20 | upstream |
| 1107 | | NO: 1914) | | |
| CEP290- | + | CUUUCUAAUGCUGGAGAGGA (SEQ ID | 20 | upstream |
| 1108 | | NO: 869) | | |
| CEP290- | + | CUAAUGCUGGAGAGGAUAGGACA | 23 | upstream |
| 1109 | | (SEQ ID NO: 1916) | | |
| CEP290- | − | CAUAAGUUACAAUCUGUGAAU (SEQ ID | 21 | upstream |
| 1110 | | NO: 1917) | | |
| CEP290- | − | CCAGACAUCUAAGAGAAAA (SEQ ID | 19 | upstream |
| 1111 | | NO: 1918) | | |
| CEP290- | − | CAGACAUCUAAGAGAAAA (SEQ ID NO: | 18 | upstream |
| 1112 | | 1919) | | |
| CEP290- | + | CCUCUAUUUCUGAUGAGGAAG (SEQ ID | 21 | upstream |
| 1113 | | NO: 1920) | | |
| CEP290- | + | CUCUAUUUCUGAUGAGGAAG (SEQ ID | 20 | upstream |
| 1114 | | NO: 866) | | |
| CEP290- | + | CUAUUUCUGAUGAGGAAG (SEQ ID NO: | 18 | upstream |
| 1115 | | 1922) | | |
| CEP290- | + | CUGAUGAGGAAGAUGAACAAAUC | 23 | upstream |
| 1116 | | (SEQ ID NO: 1923) | | |
| CEP290- | + | CAUUUACUGAAUGUGUCUCU (SEQ ID | 20 | upstream |
| 1117 | | NO: 856) | | |
| CEP290- | + | CAGGGGUAAGAGAAAGGG (SEQ ID NO: | 18 | upstream |
| 1118 | | 1925) | | |
| CEP290- | + | GUUGGCUACAUCCAUUCCA (SEQ ID | 19 | upstream |
| 1119 | | NO: 1926) | | |
| CEP290- | − | GUAGUUAUCUUACAGCCAC (SEQ ID | 19 | upstream |
| 1120 | | NO: 1927) | | |
| CEP290- | + | GUCUCUAUGAGCCAGCAAAAGCUU | 24 | upstream |
| 1121 | | (SEQ ID NO: 1928) | | |
| CEP290- | + | GAGUGCAUCCAUGGUCCAGG (SEQ ID | 20 | upstream |
| 1122 | | NO: 1929) | | |
| CEP290- | + | GUGCAUCCAUGGUCCAGG (SEQ ID NO: | 18 | upstream |
| 1123 | | 1930) | | |
| CEP290- | − | GCUGAAAUAUUAAGGGCUCUUC (SEQ | 22 | upstream |
| 1124 | | ID NO: 1931) | | |
| CEP290- | − | GAAAUAUUAAGGGCUCUUC (SEQ ID | 19 | upstream |
| 1125 | | NO: 1932) | | |
| CEP290- | − | GAACUCUAUACCUUUUACUGAGGA | 24 | upstream |
| 1126 | | (SEQ ID NO: 1933) | | |
| CEP290- | − | GAACUCUAUACCUUUUACU (SEQ ID | 19 | upstream |
| 1127 | | NO: 1934) | | |
| CEP290- | + | GUAGGAAUCCUGAAAGCUACU (SEQ ID | 21 | upstream |
| 1128 | | NO: 1935) | | |
| CEP290- | + | GGAAUCCUGAAAGCUACU (SEQ ID NO: | 18 | upstream |
| 1129 | | 1936) | | |
| CEP290- | − | GUAGCCAACAGUAGCUGAAAUAUU | 24 | upstream |
| 1130 | | (SEQ ID NO: 1937) | | |
| CEP290- | − | GCCAACAGUAGCUGAAAUAUU (SEQ ID | 21 | upstream |
| 1131 | | NO: 1938) | | |
| CEP290- | + | GGACUUUCUAAUGCUGGAGAGGA | 23 | upstream |
| 1132 | | (SEQ ID NO: 1939) | | |
| CEP290- | + | GACUUUCUAAUGCUGGAGAGGA (SEQ | 22 | upstream |
| 1133 | | ID NO: 1940) | | |
| CEP290- | + | GCUGGAGAGGAUAGGACA (SEQ ID NO: | 18 | upstream |
| 1134 | | 1941) | | |
| CEP290- | + | GCCUCUAUUUCUGAUGAGGAAG (SEQ | 22 | upstream |
| 1135 | | ID NO: 1942) | | |
| CEP290- | + | GAUGAGGAAGAUGAACAAAUC (SEQ ID | 21 | upstream |
| 1136 | | NO: 1943) | | |
| CEP290- | + | GAGGAAGAUGAACAAAUC (SEQ ID NO: | 18 | upstream |
| 1137 | | 1944) | | |
| CEP290- | + | GGGUACAGGGGUAAGAGAAAGGG | 23 | upstream |
| 1138 | | (SEQ ID NO: 1945) | | |
| CEP290- | + | GGUACAGGGGUAAGAGAAAGGG (SEQ | 22 | upstream |
| 1139 | | ID NO: 1946) | | |
| CEP290- | + | GUACAGGGGUAAGAGAAAGGG (SEQ | 21 | upstream |
| 1140 | | ID NO: 1947) | | |
| CEP290- | + | GUGUGUGUGUGUGUGUGUUAUGU | 23 | upstream |
| 1141 | | (SEQ ID NO: 1948) | | |
| CEP290- | + | GUGUGUGUGUGUGUGUUAUGU (SEQ | 21 | upstream |
| 1142 | | ID NO: 1949) | | |
| CEP290- | + | GUGUGUGUGUGUGUUAUGU (SEQ ID | 19 | upstream |
| 1143 | | NO: 1950) | | |
| CEP290- | + | UACUGUUGGCUACAUCCAUUCCA (SEQ | 23 | upstream |
| 1144 | | ID NO: 1951) | | |
| CEP290- | + | UGUUGGCUACAUCCAUUCCA (SEQ ID | 20 | upstream |
| 1145 | | NO: 1952) | | |
| CEP290- | + | UUGGCUACAUCCAUUCCA (SEQ ID NO: | 18 | upstream |
| 1146 | | 1953) | | |
| CEP290- | + | UUAUCCACAAGAUGUCUCUUGCC (SEQ | 23 | upstream |
| 1147 | | ID NO: 1954) | | |
| CEP290- | + | UAUCCACAAGAUGUCUCUUGCC (SEQ | 22 | upstream |
| 1148 | | ID NO: 1955) | | |
| CEP290- | + | UCCACAAGAUGUCUCUUGCC (SEQ ID | 20 | upstream |
| 1149 | | NO: 885) | | |
| CEP290- | − | UUUGUAGUUAUCUUACAGCCAC (SEQ | 22 | upstream |
| 1150 | | ID NO: 1957) | | |
| CEP290- | − | UUGUAGUUAUCUUACAGCCAC (SEQ ID | 21 | upstream |
| 1151 | | NO: 1958) | | |
| CEP290- | − | UGUAGUUAUCUUACAGCCAC (SEQ ID | 20 | upstream |
| 1152 | | NO: 1959) | | |
| CEP290- | − | UAGUUAUCUUACAGCCAC (SEQ ID NO: | 18 | upstream |
| 1153 | | 1960) | | |
| CEP290- | + | UCUCUAUGAGCCAGCAAAAGCUU (SEQ | 23 | upstream |
| 1154 | | ID NO: 1961) | | |
| CEP290- | + | UCUAUGAGCCAGCAAAAGCUU (SEQ ID | 21 | upstream |
| 1155 | | NO: 1962) | | |
| CEP290- | + | UAUGAGCCAGCAAAAGCUU (SEQ ID | 19 | upstream |
| 1156 | | NO: 1963) | | |
| CEP290- | + | UACAGAGUGCAUCCAUGGUCCAGG | 24 | upstream |
| 1157 | | (SEQ ID NO: 1964) | | |
| CEP290- | − | UAGCUGAAAUAUUAAGGGCUCUUC | 24 | upstream |
| 1158 | | (SEQ ID NO: 1965) | | |
| CEP290- | − | UGAAAUAUUAAGGGCUCUUC (SEQ ID | 20 | upstream |
| 1159 | | NO: 1966) | | |
| CEP290- | − | UCUAUACCUUUUACUGAGGA (SEQ ID | 20 | upstream |
| 1160 | | NO: 889) | | |
| CEP290- | − | UAUACCUUUUACUGAGGA (SEQ ID NO: | 18 | upstream |
| 1161 | | 1968) | | |
| CEP290- | − | UUGAACUCUAUACCUUUUACU (SEQ ID | 21 | upstream |
| 1162 | | NO: 1969) | | |
| CEP290- | − | UGAACUCUAUACCUUUUACU (SEQ ID | 20 | upstream |
| 1163 | | NO: 1970) | | |
| CEP290- | + | UUAGUAGGAAUCCUGAAAGCUACU | 24 | upstream |
| 1164 | | (SEQ ID NO: 1971) | | |
| CEP290- | + | UAGUAGGAAUCCUGAAAGCUACU (SEQ | 23 | upstream |
| 1165 | | ID NO: 1972) | | |
| CEP290- | + | UAGGAAUCCUGAAAGCUACU (SEQ ID | 20 | upstream |
| 1166 | | NO: 760) | | |
| CEP290- | − | UAGCCAACAGUAGCUGAAAUAUU (SEQ | 23 | upstream |
| 1167 | | ID NO: 1974) | | |
| CEP290- | + | UCCAUUCCAAGGAACAAAAGCC (SEQ | 22 | upstream |
| 1168 | | ID NO: 1975) | | |
| CEP290- | + | UUCCAAGGAACAAAAGCC (SEQ ID NO: | 18 | upstream |
| 1169 | | 1976) | | |
| CEP290- | − | UCCCUUUCUCUUACCCCUGUACC (SEQ | 23 | upstream |
| 1170 | | ID NO: 1977) | | |
| CEP290- | − | UUUCUCUUACCCCUGUACC (SEQ ID | 19 | upstream |
| 1171 | | NO: 1978) | | |
| CEP290- | − | UUCUCUUACCCCUGUACC (SEQ ID NO: | 18 | upstream |
| 1172 | | 1979) | | |
| CEP290- | + | UUUCUAAUGCUGGAGAGGA (SEQ ID | 19 | upstream |
| 1173 | | NO: 1980) | | |
| CEP290- | + | UUCUAAUGCUGGAGAGGA (SEQ ID NO: | 18 | upstream |
| 1174 | | 1981) | | |
| CEP290- | + | UCUAAUGCUGGAGAGGAUAGGACA | 24 | upstream |
| 1175 | | (SEQ ID NO: 1982) | | |
| CEP290- | + | UAAUGCUGGAGAGGAUAGGACA (SEQ | 22 | upstream |
| 1176 | | ID NO: 1983) | | |
| CEP290- | + | UGCUGGAGAGGAUAGGACA (SEQ ID | 19 | upstream |
| 1177 | | NO: 1984) | | |
| CEP290- | − | UAUCAUAAGUUACAAUCUGUGAAU | 24 | upstream |
| 1178 | | (SEQ ID NO: 1985) | | |
| CEP290- | − | UCAUAAGUUACAAUCUGUGAAU (SEQ | 22 | upstream |
| 1179 | | ID NO: 1986) | | |
| CEP290- | − | UAAGUUACAAUCUGUGAAU (SEQ ID | 19 | upstream |
| 1180 | | NO: 1987) | | |
| CEP290- | − | UUUAACCAGACAUCUAAGAGAAAA | 24 | upstream |
| 1181 | | (SEQ ID NO: 1988) | | |
| CEP290- | − | UUAACCAGACAUCUAAGAGAAAA (SEQ | 23 | upstream |
| 1182 | | ID NO: 1989) | | |
| CEP290- | − | UAACCAGACAUCUAAGAGAAAA (SEQ | 22 | upstream |
| 1183 | | ID NO: 1990) | | |
| CEP290- | + | UCUAUUUCUGAUGAGGAAG (SEQ ID | 19 | upstream |
| 1184 | | NO: 1991) | | |
| CEP290- | + | UCUGAUGAGGAAGAUGAACAAAUC | 24 | upstream |
| 1185 | | (SEQ ID NO: 1992) | | |
| CEP290- | + | UGAUGAGGAAGAUGAACAAAUC (SEQ | 22 | upstream |
| 1186 | | ID NO: 1993) | | |
| CEP290- | + | UGAGGAAGAUGAACAAAUC (SEQ ID | 19 | upstream |
| 1187 | | NO: 1994) | | |
| CEP290- | + | UUUUCAUUUACUGAAUGUGUCUCU | 24 | upstream |
| 1188 | | (SEQ ID NO: 1995) | | |
| CEP290- | + | UUUCAUUUACUGAAUGUGUCUCU (SEQ | 23 | upstream |
| 1189 | | ID NO: 1996) | | |
| CEP290- | + | UUCAUUUACUGAAUGUGUCUCU (SEQ | 22 | upstream |
| 1190 | | ID NO: 1997) | | |
| CEP290- | + | UCAUUUACUGAAUGUGUCUCU (SEQ ID | 21 | upstream |
| 1191 | | NO: 1998) | | |
| CEP290- | + | UUUACUGAAUGUGUCUCU (SEQ ID NO: | 18 | upstream |
| 1192 | | 1999) | | |
| CEP290- | + | UGGGUACAGGGGUAAGAGAAAGGG | 24 | upstream |
| 1193 | | (SEQ ID NO: 2000) | | |
| CEP290- | + | UACAGGGGUAAGAGAAAGGG (SEQ ID | 20 | upstream |
| 1194 | | NO: 2001) | | |
| CEP290- | + | UGUGUGUGUGUGUGUGUGUUAUGU | 24 | upstream |
| 1195 | | (SEQ ID NO: 2002) | | |
| CEP290- | + | UGUGUGUGUGUGUGUGUUAUGU (SEQ | 22 | upstream |
| 1196 | | ID NO: 2003) | | |
| CEP290- | + | UGUGUGUGUGUGUGUUAUGU (SEQ ID | 20 | upstream |
| 1197 | | NO: 1185) | | |
| CEP290- | + | UGUGUGUGUGUGUUAUGU (SEQ ID NO: | 18 | upstream |
| 1198 | | 2005) | | |
| CEP290- | + | AUUUACAGAGUGCAUCCAUGGUCC | 24 | upstream |
| 1199 | | (SEQ ID NO: 2006) | | |
| CEP290- | + | ACAGAGUGCAUCCAUGGUCC (SEQ ID | 20 | upstream |
| 1200 | | NO: 1085) | | |
| CEP290- | + | AGAGUGCAUCCAUGGUCC (SEQ ID NO: | 18 | upstream |
| 1201 | | 2008) | | |
| CEP290- | − | ACUUGAACUCUAUACCUUUUA (SEQ ID | 21 | upstream |
| 1202 | | NO: 2009) | | |
| CEP290- | + | AGCUAAAUCAUGCAAGUGACCU (SEQ | 22 | upstream |
| 1203 | | ID NO: 2010) | | |
| CEP290- | + | AAAUCAUGCAAGUGACCU (SEQ ID NO: | 18 | upstream |
| 1204 | | 2011) | | |
| CEP290- | + | AUCCAUAAGCCUCUAUUUCUGAUG | 24 | upstream |
| 1205 | | (SEQ ID NO: 2012) | | |
| CEP290- | + | AUAAGCCUCUAUUUCUGAUG (SEQ ID | 20 | upstream |
| 1206 | | NO: 723) | | |
| CEP290- | + | AAGCCUCUAUUUCUGAUG (SEQ ID NO: | 18 | upstream |
| 1207 | | 2014) | | |
| CEP290- | + | AGAAUAGUUUGUUCUGGGUA (SEQ ID | 20 | upstream |
| 1208 | | NO: 2015) | | |
| CEP290- | + | AAUAGUUUGUUCUGGGUA (SEQ ID NO: | 18 | upstream |
| 1209 | | 2016) | | |
| CEP290- | + | AGGAGAAUGAUCUAGAUAAUCAUU | 24 | upstream |
| 1210 | | (SEQ ID NO: 2017) | | |
| CEP290- | + | AGAAUGAUCUAGAUAAUCAUU (SEQ ID | 21 | upstream |
| 1211 | | NO: 2018) | | |
| CEP290- | + | AAUGAUCUAGAUAAUCAUU (SEQ ID | 19 | upstream |
| 1212 | | NO: 2019) | | |
| CEP290- | + | AUGAUCUAGAUAAUCAUU (SEQ ID NO: | 18 | upstream |
| 1213 | | 2020) | | |
| CEP290- | + | AAUGCUGGAGAGGAUAGGA (SEQ ID | 19 | upstream |
| 1214 | | NO: 2021) | | |
| CEP290- | + | AUGCUGGAGAGGAUAGGA (SEQ ID NO: | 18 | upstream |
| 1215 | | 2022) | | |
| CEP290- | + | AAAAUCCAUAAGCCUCUAUUUCUG | 24 | upstream |
| 1216 | | (SEQ ID NO: 2023) | | |
| CEP290- | + | AAAUCCAUAAGCCUCUAUUUCUG (SEQ | 23 | upstream |
| 1217 | | ID NO: 2024) | | |
| CEP290- | + | AAUCCAUAAGCCUCUAUUUCUG (SEQ | 22 | upstream |
| 1218 | | ID NO: 2025) | | |
| CEP290- | + | AUCCAUAAGCCUCUAUUUCUG (SEQ ID | 21 | upstream |
| 1219 | | NO: 2026) | | |
| CEP290- | − | AAACAGGUAGAAUAUUGUAAUCA | 23 | upstream |
| 1220 | | (SEQ ID NO: 2027) | | |
| CEP290- | − | AACAGGUAGAAUAUUGUAAUCA (SEQ | 22 | upstream |
| 1221 | | ID NO: 2028) | | |
| CEP290- | − | ACAGGUAGAAUAUUGUAAUCA (SEQ ID | 21 | upstream |
| 1222 | | NO: 2029) | | |
| CEP290- | − | AGGUAGAAUAUUGUAAUCA (SEQ ID | 19 | upstream |
| 1223 | | NO: 2030) | | |
| CEP290- | + | AAGGAACAAAAGCCAGGGACCA (SEQ | 22 | upstream |
| 1224 | | ID NO: 2031) | | |
| CEP290- | + | AGGAACAAAAGCCAGGGACCA (SEQ ID | 21 | upstream |
| 1225 | | NO: 2032) | | |
| CEP290- | + | AACAAAAGCCAGGGACCA (SEQ ID NO: | 18 | upstream |
| 1226 | | 2033) | | |
| CEP290- | − | AGGUAGAAUAUUGUAAUCAAAGGA | 24 | upstream |
| 1227 | | (SEQ ID NO: 2034) | | |
| CEP290- | − | AGAAUAUUGUAAUCAAAGGA (SEQ ID | 20 | upstream |
| 1228 | | NO: 1089) | | |
| CEP290- | − | AAUAUUGUAAUCAAAGGA (SEQ ID NO: | 18 | upstream |
| 1229 | | 2036) | | |
| CEP290- | − | AGUCAUGUUUAUCAAUAUUAUU (SEQ | 22 | upstream |
| 1230 | | ID NO: 2037) | | |
| CEP290- | − | AUGUUUAUCAAUAUUAUU (SEQ ID NO: | 18 | upstream |
| 1231 | | 2038) | | |
| CEP290- | − | AACCAGACAUCUAAGAGAAA (SEQ ID | 20 | upstream |
| 1232 | | NO: 2039) | | |
| CEP290- | − | ACCAGACAUCUAAGAGAAA (SEQ ID | 19 | upstream |
| 1233 | | NO: 2040) | | |
| CEP290- | − | AUUCUUAUCUAAGAUCCUUUCA (SEQ | 22 | upstream |
| 1234 | | ID NO: 2041) | | |
| CEP290- | − | AAACAGGUAGAAUAUUGUAAUCAA | 24 | upstream |
| 1235 | | (SEQ ID NO: 2042) | | |
| CEP290- | − | AACAGGUAGAAUAUUGUAAUCAA | 23 | upstream |
| 1236 | | (SEQ ID NO: 2043) | | |
| CEP290- | − | ACAGGUAGAAUAUUGUAAUCAA (SEQ | 22 | upstream |
| 1237 | | ID NO: 2044) | | |
| CEP290- | − | AGGUAGAAUAUUGUAAUCAA (SEQ ID | 20 | upstream |
| 1238 | | NO: 1101) | | |
| CEP290- | + | AUGAGGAAGAUGAACAAAU (SEQ ID | 19 | upstream |
| 1239 | | NO: 2046) | | |
| CEP290- | + | AGAGGAUAGGACAGAGGAC (SEQ ID | 19 | upstream |
| 1240 | | NO: 2047) | | |
| CEP290- | + | CAGAGUGCAUCCAUGGUCC (SEQ ID | 19 | upstream |
| 1241 | | NO: 2048) | | |
| CEP290- | + | CUUGCCUAGGACUUUCUAAUGCUG | 24 | upstream |
| 1242 | | (SEQ ID NO: 2049) | | |
| CEP290- | + | CCUAGGACUUUCUAAUGCUG (SEQ ID | 20 | upstream |
| 1243 | | NO: 858) | | |
| CEP290- | + | CUAGGACUUUCUAAUGCUG (SEQ ID | 19 | upstream |
| 1244 | | NO: 2051) | | |
| CEP290- | − | CCACUUGAACUCUAUACCUUUUA (SEQ | 23 | upstream |
| 1245 | | ID NO: 2052) | | |
| CEP290- | − | CACUUGAACUCUAUACCUUUUA (SEQ | 22 | upstream |
| 1246 | | ID NO: 2053) | | |
| CEP290- | − | CUUGAACUCUAUACCUUUUA (SEQ ID | 20 | upstream |
| 1247 | | NO: 2054) | | |
| CEP290- | + | CAGCUAAAUCAUGCAAGUGACCU (SEQ | 23 | upstream |
| 1248 | | ID NO: 2055) | | |
| CEP290- | + | CUAAAUCAUGCAAGUGACCU (SEQ ID | 20 | upstream |
| 1249 | | NO: 2056) | | |
| CEP290- | + | CUCUUGCCUAGGACUUUCUAAUG (SEQ | 23 | upstream |
| 1250 | | ID NO: 2057) | | |
| CEP290- | + | CUUGCCUAGGACUUUCUAAUG (SEQ ID | 21 | upstream |
| 1251 | | NO: 2058) | | |
| CEP290- | + | CCAUAAGCCUCUAUUUCUGAUG (SEQ | 22 | upstream |
| 1252 | | ID NO: 2059) | | |
| CEP290- | + | CAUAAGCCUCUAUUUCUGAUG (SEQ ID | 21 | upstream |
| 1253 | | NO: 2060) | | |
| CEP290- | + | CUAAUGCUGGAGAGGAUAGGA (SEQ ID | 21 | upstream |
| 1254 | | NO: 2061) | | |
| CEP290- | + | CCAUAAGCCUCUAUUUCUG (SEQ ID | 19 | upstream |
| 1255 | | NO: 2062) | | |
| CEP290- | + | CAUAAGCCUCUAUUUCUG (SEQ ID NO: | 18 | upstream |
| 1256 | | 2063) | | |
| CEP290- | − | CAGGUAGAAUAUUGUAAUCA (SEQ ID | 20 | upstream |
| 1257 | | NO: 2064) | | |
| CEP290- | − | CUUUCUGCUGCUUUUGCCAAA (SEQ ID | 21 | upstream |
| 1258 | | NO: 2065) | | |
| CEP290- | + | CCAAGGAACAAAAGCCAGGGACCA | 24 | upstream |
| 1259 | | (SEQ ID NO: 2066) | | |
| CEP290- | + | CAAGGAACAAAAGCCAGGGACCA (SEQ | 23 | upstream |
| 1260 | | ID NO: 2067) | | |
| CEP290- | + | CUCUUAGAUGUCUGGUUAA (SEQ ID | 19 | upstream |
| 1261 | | NO: 2068) | | |
| CEP290- | − | CAUGUUUAUCAAUAUUAUU (SEQ ID | 19 | upstream |
| 1262 | | NO: 2069) | | |
| CEP290- | − | CCAGACAUCUAAGAGAAA (SEQ ID NO: | 18 | upstream |
| 1263 | | 2070) | | |
| CEP290- | − | CUUAUCUAAGAUCCUUUCA (SEQ ID | 19 | upstream |
| 1264 | | NO: 2071) | | |
| CEP290- | − | CAGGUAGAAUAUUGUAAUCAA (SEQ ID | 21 | upstream |
| 1265 | | NO: 2072) | | |
| CEP290- | + | CUGAUGAGGAAGAUGAACAAAU (SEQ | 22 | upstream |
| 1266 | | ID NO: 2073) | | |
| CEP290- | + | CUGGAGAGGAUAGGACAGAGGAC | 23 | upstream |
| 1267 | | (SEQ ID NO: 2074) | | |
| CEP290- | − | CAUCUUCCUCAUCAGAAA (SEQ ID NO: | 18 | upstream |
| 1268 | | 2075) | | |
| CEP290- | + | GCCUAGGACUUUCUAAUGCUG (SEQ ID | 21 | upstream |
| 1269 | | NO: 2076) | | |
| CEP290- | − | GCCACUUGAACUCUAUACCUUUUA | 24 | upstream |
| 1270 | | (SEQ ID NO: 2077) | | |
| CEP290- | + | GCUAAAUCAUGCAAGUGACCU (SEQ ID | 21 | upstream |
| 1271 | | NO: 2078) | | |
| CEP290- | + | GCCUAGGACUUUCUAAUG (SEQ ID NO: | 18 | upstream |
| 1272 | | 2079) | | |
| CEP290- | + | GGGAGAAUAGUUUGUUCUGGGUA | 23 | upstream |
| 1273 | | (SEQ ID NO: 2080) | | |
| CEP290- | + | GGAGAAUAGUUUGUUCUGGGUA (SEQ | 22 | upstream |
| 1274 | | ID NO: 2081) | | |
| CEP290- | + | GAGAAUAGUUUGUUCUGGGUA (SEQ | 21 | upstream |
| 1275 | | ID NO: 2082) | | |
| CEP290- | + | GAAUAGUUUGUUCUGGGUA (SEQ ID | 19 | upstream |
| 1276 | | NO: 2083) | | |
| CEP290- | + | GGAGAAUGAUCUAGAUAAUCAUU | 23 | upstream |
| 1277 | | (SEQ ID NO: 2084) | | |
| CEP290- | + | GAGAAUGAUCUAGAUAAUCAUU (SEQ | 22 | upstream |
| 1278 | | ID NO: 2085) | | |
| CEP290- | + | GAAUGAUCUAGAUAAUCAUU (SEQ ID | 20 | upstream |
| 1279 | | NO: 2086) | | |
| CEP290- | − | GAAACAGGUAGAAUAUUGUAAUCA | 24 | upstream |
| 1280 | | (SEQ ID NO: 2087) | | |
| CEP290- | − | GGUAGAAUAUUGUAAUCA (SEQ ID NO: | 18 | upstream |
| 1281 | | 2088) | | |
| CEP290- | − | GCUUUCUGCUGCUUUUGCCAAA (SEQ | 22 | upstream |
| 1282 | | ID NO: 2089) | | |
| CEP290- | + | GGAACAAAAGCCAGGGACCA (SEQ ID | 20 | upstream |
| 1283 | | NO: 484) | | |
| CEP290- | + | GAACAAAAGCCAGGGACCA (SEQ ID | 19 | upstream |
| 1284 | | NO: 2090) | | |
| CEP290- | − | GGUAGAAUAUUGUAAUCAAAGGA | 23 | upstream |
| 1285 | | (SEQ ID NO: 2091) | | |
| CEP290- | − | GUAGAAUAUUGUAAUCAAAGGA (SEQ | 22 | upstream |
| 1286 | | ID NO: 2092) | | |
| CEP290- | − | GAAUAUUGUAAUCAAAGGA (SEQ ID | 19 | upstream |
| 1287 | | NO: 2093) | | |
| CEP290- | − | GAGUCAUGUUUAUCAAUAUUAUU | 23 | upstream |
| 1288 | | (SEQ ID NO: 2094) | | |
| CEP290- | − | GUCAUGUUUAUCAAUAUUAUU (SEQ ID | 21 | upstream |
| 1289 | | NO: 2095) | | |
| CEP290- | − | GGUAGAAUAUUGUAAUCAA (SEQ ID | 19 | upstream |
| 1290 | | NO: 2096) | | |
| CEP290- | − | GUAGAAUAUUGUAAUCAA (SEQ ID NO: | 18 | upstream |
| 1291 | | 2097) | | |
| CEP290- | + | GAUGAGGAAGAUGAACAAAU (SEQ ID | 20 | upstream |
| 1292 | | NO: 773) | | |
| CEP290- | + | GCUGGAGAGGAUAGGACAGAGGAC | 24 | upstream |
| 1293 | | (SEQ ID NO: 2099) | | |
| CEP290- | + | GGAGAGGAUAGGACAGAGGAC (SEQ ID | 21 | upstream |
| 1294 | | NO: 2100) | | |
| CEP290- | + | GAGAGGAUAGGACAGAGGAC (SEQ ID | 20 | upstream |
| 1295 | | NO: 772) | | |
| CEP290- | + | GAGGAUAGGACAGAGGAC (SEQ ID NO: | 18 | upstream |
| 1296 | | 2102) | | |
| CEP290- | − | GUUCAUCUUCCUCAUCAGAAA (SEQ ID | 21 | upstream |
| 1297 | | NO: 2103) | | |
| CEP290- | + | UUUACAGAGUGCAUCCAUGGUCC (SEQ | 23 | upstream |
| 1298 | | ID NO: 2104) | | |
| CEP290- | + | UUACAGAGUGCAUCCAUGGUCC (SEQ | 22 | upstream |
| 1299 | | ID NO: 2105) | | |
| CEP290- | + | UACAGAGUGCAUCCAUGGUCC (SEQ ID | 21 | upstream |
| 1300 | | NO: 2106) | | |
| CEP290- | + | UUGCCUAGGACUUUCUAAUGCUG (SEQ | 23 | upstream |
| 1301 | | ID NO: 2107) | | |
| CEP290- | + | UGCCUAGGACUUUCUAAUGCUG (SEQ | 22 | upstream |
| 1302 | | ID NO: 2108) | | |
| CEP290- | + | UAGGACUUUCUAAUGCUG (SEQ ID NO: | 18 | upstream |
| 1303 | | 2109) | | |
| CEP290- | − | UUGAACUCUAUACCUUUUA (SEQ ID | 19 | upstream |
| 1304 | | NO: 2110) | | |
| CEP290- | − | UGAACUCUAUACCUUUUA (SEQ ID NO: | 18 | upstream |
| 1305 | | 2111) | | |
| CEP290- | + | UCAGCUAAAUCAUGCAAGUGACCU | 24 | upstream |
| 1306 | | (SEQ ID NO: 2112) | | |
| CEP290- | + | UAAAUCAUGCAAGUGACCU (SEQ ID | 19 | upstream |
| 1307 | | NO: 2113) | | |
| CEP290- | + | UCUCUUGCCUAGGACUUUCUAAUG | 24 | upstream |
| 1308 | | (SEQ ID NO: 2114) | | |
| CEP290- | + | UCUUGCCUAGGACUUUCUAAUG (SEQ | 22 | upstream |
| 1309 | | ID NO: 2115) | | |
| CEP290- | + | UUGCCUAGGACUUUCUAAUG (SEQ ID | 20 | upstream |
| 1310 | | NO: 906) | | |
| CEP290- | + | UGCCUAGGACUUUCUAAUG (SEQ ID | 19 | upstream |
| 1311 | | NO: 2117) | | |
| CEP290- | + | UCCAUAAGCCUCUAUUUCUGAUG (SEQ | 23 | upstream |
| 1312 | | ID NO: 2118) | | |
| CEP290- | + | UAAGCCUCUAUUUCUGAUG (SEQ ID | 19 | upstream |
| 1313 | | NO: 2119) | | |
| CEP290- | + | UGGGAGAAUAGUUUGUUCUGGGUA | 24 | upstream |
| 1314 | | (SEQ ID NO: 2120) | | |
| CEP290- | + | UUUCUAAUGCUGGAGAGGAUAGGA | 24 | upstream |
| 1315 | | (SEQ ID NO: 2121) | | |
| CEP290- | + | UUCUAAUGCUGGAGAGGAUAGGA | 23 | upstream |
| 1316 | | (SEQ ID NO: 2122) | | |
| CEP290- | + | UCUAAUGCUGGAGAGGAUAGGA (SEQ | 22 | upstream |
| 1317 | | ID NO: 2123) | | |
| CEP290- | + | UAAUGCUGGAGAGGAUAGGA (SEQ ID | 20 | upstream |
| 1318 | | NO: 873) | | |
| CEP290- | + | UCCAUAAGCCUCUAUUUCUG (SEQ ID | 20 | upstream |
| 1319 | | NO: 886) | | |
| CEP290- | − | UUGCUUUCUGCUGCUUUUGCCAAA | 24 | upstream |
| 1320 | | (SEQ ID NO: 2126) | | |
| CEP290- | − | UGCUUUCUGCUGCUUUUGCCAAA (SEQ | 23 | upstream |
| 1321 | | ID NO: 2127) | | |
| CEP290- | − | UUUCUGCUGCUUUUGCCAAA (SEQ ID | 20 | upstream |
| 1322 | | NO: 907) | | |
| CEP290- | − | UUCUGCUGCUUUUGCCAAA (SEQ ID | 19 | upstream |
| 1323 | | NO: 2129) | | |
| CEP290- | − | UCUGCUGCUUUUGCCAAA (SEQ ID NO: | 18 | upstream |
| 1324 | | 2130) | | |
| CEP290- | − | UAGAAUAUUGUAAUCAAAGGA (SEQ | 21 | upstream |
| 1325 | | ID NO: 2131) | | |
| CEP290- | + | UUUUUCUCUUAGAUGUCUGGUUAA | 24 | upstream |
| 1326 | | (SEQ ID NO: 2132) | | |
| CEP290- | + | UUUUCUCUUAGAUGUCUGGUUAA | 23 | upstream |
| 1327 | | (SEQ ID NO: 2133) | | |
| CEP290- | + | UUUCUCUUAGAUGUCUGGUUAA (SEQ | 22 | upstream |
| 1328 | | ID NO: 2134) | | |
| CEP290- | + | UUCUCUUAGAUGUCUGGUUAA (SEQ ID | 21 | upstream |
| 1329 | | NO: 2135) | | |
| CEP290- | + | UCUCUUAGAUGUCUGGUUAA (SEQ ID | 20 | upstream |
| 1330 | | NO: 2136) | | |
| CEP290- | + | UCUUAGAUGUCUGGUUAA (SEQ ID NO: | 18 | upstream |
| 1331 | | 2137) | | |
| CEP290- | − | UGAGUCAUGUUUAUCAAUAUUAUU | 24 | upstream |
| 1332 | | (SEQ ID NO: 2138) | | |
| CEP290- | − | UCAUGUUUAUCAAUAUUAUU (SEQ ID | 20 | upstream |
| 1333 | | NO: 884) | | |
| CEP290- | − | UUUUAACCAGACAUCUAAGAGAAA | 24 | upstream |
| 1334 | | (SEQ ID NO: 2140) | | |
| CEP290- | − | UUUAACCAGACAUCUAAGAGAAA (SEQ | 23 | upstream |
| 1335 | | ID NO: 2141) | | |
| CEP290- | − | UUAACCAGACAUCUAAGAGAAA (SEQ | 22 | upstream |
| 1336 | | ID NO: 2142) | | |
| CEP290- | − | UAACCAGACAUCUAAGAGAAA (SEQ ID | 21 | upstream |
| 1337 | | NO: 2143) | | |
| CEP290- | − | UUAUUCUUAUCUAAGAUCCUUUCA | 24 | upstream |
| 1338 | | (SEQ ID NO: 2144) | | |
| CEP290- | − | UAUUCUUAUCUAAGAUCCUUUCA (SEQ | 23 | upstream |
| 1339 | | ID NO: 2145) | | |
| CEP290- | − | UUCUUAUCUAAGAUCCUUUCA (SEQ ID | 21 | upstream |
| 1340 | | NO: 2146) | | |
| CEP290- | − | UCUUAUCUAAGAUCCUUUCA (SEQ ID | 20 | upstream |
| 1341 | | NO: 892) | | |
| CEP290- | − | UUAUCUAAGAUCCUUUCA (SEQ ID NO: | 18 | upstream |
| 1342 | | 2148) | | |
| CEP290- | + | UUCUGAUGAGGAAGAUGAACAAAU | 24 | upstream |
| 1343 | | (SEQ ID NO: 2149) | | |
| CEP290- | + | UCUGAUGAGGAAGAUGAACAAAU | 23 | upstream |
| 1344 | | (SEQ ID NO: 2150) | | |
| CEP290- | + | UGAUGAGGAAGAUGAACAAAU (SEQ | 21 | upstream |
| 1345 | | ID NO: 2151) | | |
| CEP290- | + | UGAGGAAGAUGAACAAAU (SEQ ID NO: | 18 | upstream |
| 1346 | | 2152) | | |
| CEP290- | + | UGGAGAGGAUAGGACAGAGGAC (SEQ | 22 | upstream |
| 1347 | | ID NO: 2153) | | |
| CEP290- | − | UUUGUUCAUCUUCCUCAUCAGAAA | 24 | upstream |
| 1348 | | (SEQ ID NO: 2154) | | |
| CEP290- | − | UUGUUCAUCUUCCUCAUCAGAAA (SEQ | 23 | upstream |
| 1349 | | ID NO: 2155) | | |
| CEP290- | − | UGUUCAUCUUCCUCAUCAGAAA (SEQ | 22 | upstream |
| 1350 | | ID NO: 2156) | | |
| CEP290- | − | UUCAUCUUCCUCAUCAGAAA (SEQ ID | 20 | upstream |
| 1351 | | NO: 905) | | |
| CEP290- | − | UCAUCUUCCUCAUCAGAAA (SEQ ID | 19 | upstream |
| 1352 | | NO: 2158) | | |
| CEP290- | − | ACUUACCUCAUGUCAUCUAGAGC (SEQ | 23 | downstream |
| 1353 | | ID NO: 2159) | | |
| CEP290- | − | ACCUCAUGUCAUCUAGAGC (SEQ ID | 19 | downstream |
| 1354 | | NO: 2160) | | |
| CEP290- | + | ACAGUUUUUAAGGCGGGGAGUCAC | 24 | downstream |
| 1355 | | (SEQ ID NO: 2161) | | |
| CEP290- | + | AGUUUUUAAGGCGGGGAGUCAC (SEQ | 22 | downstream |
| 1356 | | ID NO: 2162) | | |
| CEP290- | − | ACAGAGUUCAAGCUAAUAC (SEQ ID | 19 | downstream |
| 1357 | | NO: 2163) | | |
| CEP290- | + | AUUAGCUUGAACUCUGUGCCAAAC | 24 | downstream |
| 1358 | | (SEQ ID NO: 2164) | | |
| CEP290- | + | AGCUUGAACUCUGUGCCAAAC (SEQ ID | 21 | downstream |
| 1359 | | NO: 2165) | | |
| CEP290- | − | AUGUGGUGUCAAAUAUGGUGCU (SEQ | 22 | downstream |
| 1360 | | ID NO: 2166) | | |
| CEP290- | − | AUGUGGUGUCAAAUAUGGUGCUU | 23 | downstream |
| 1361 | | (SEQ ID NO: 2167) | | |
| CEP290- | + | AGAUGACAUGAGGUAAGU (SEQ ID NO: | 18 | downstream |
| 1362 | | 2168) | | |
| CEP290- | − | AAUACAUGAGAGUGAUUAGUGG (SEQ | 22 | downstream |
| 1363 | | ID NO: 2169) | | |
| CEP290- | − | AUACAUGAGAGUGAUUAGUGG (SEQ | 21 | downstream |
| 1364 | | ID NO: 2170) | | |
| CEP290- | − | ACAUGAGAGUGAUUAGUGG (SEQ ID | 19 | downstream |
| 1365 | | NO: 2171) | | |
| CEP290-16 | + | AAGACACUGCCAAUAGGGAUAGGU | 24 | downstream |
| | | (SEQ ID NO: 1042) | | |
| CEP290- | + | AGACACUGCCAAUAGGGAUAGGU (SEQ | 23 | downstream |
| 1366 | | ID NO: 1043) | | |
| CEP290- | + | ACACUGCCAAUAGGGAUAGGU (SEQ ID | 21 | downstream |
| 1367 | | NO: 1044) | | |
| CEP290-510 | + | ACUGCCAAUAGGGAUAGGU (SEQ ID | 19 | downstream |
| | | NO: 1045) | | |
| CEP290- | − | AAAGGUUCAUGAGACUAGAGGUC | 23 | downstream |
| 1368 | | (SEQ ID NO: 2176) | | |
| CEP290- | − | AAGGUUCAUGAGACUAGAGGUC (SEQ | 22 | downstream |
| 1369 | | ID NO: 2177) | | |
| CEP290- | − | AGGUUCAUGAGACUAGAGGUC (SEQ ID | 21 | downstream |
| 1370 | | NO: 2178) | | |
| CEP290- | + | AAACAGGAGAUACUCAACACA (SEQ ID | 21 | downstream |
| 1371 | | NO: 2179) | | |
| CEP290- | + | AACAGGAGAUACUCAACACA (SEQ ID | 20 | downstream |
| 1372 | | NO: 810) | | |
| CEP290- | + | ACAGGAGAUACUCAACACA (SEQ ID | 19 | downstream |
| 1373 | | NO: 2181) | | |
| CEP290- | + | AGCACGUACAAAAGAACAUACAU (SEQ | 23 | downstream |
| 1374 | | ID NO: 2182) | | |
| CEP290- | + | ACGUACAAAAGAACAUACAU (SEQ ID | 20 | downstream |
| 1375 | | NO: 817) | | |
| CEP290- | + | AGUAAGGAGGAUGUAAGAC (SEQ ID | 19 | downstream |
| 1376 | | NO: 2184) | | |
| CEP290- | + | AGCUUUUGACAGUUUUUAAGG (SEQ ID | 21 | downstream |
| 1377 | | NO: 2185) | | |
| CEP290- | − | ACGUGCUCUUUUCUAUAUAU (SEQ ID | 20 | downstream |
| 1378 | | NO: 622) | | |
| CEP290- | + | AAAUUCACUGAGCAAAACAACUGG | 24 | downstream |
| 1379 | | (SEQ ID NO: 2186) | | |
| CEP290- | + | AAUUCACUGAGCAAAACAACUGG (SEQ | 23 | downstream |
| 1380 | | ID NO: 2187) | | |
| CEP290- | + | AUUCACUGAGCAAAACAACUGG (SEQ | 22 | downstream |
| 1381 | | ID NO: 2188) | | |
| CEP290- | + | ACUGAGCAAAACAACUGG (SEQ ID NO: | 18 | downstream |
| 1382 | | 2189) | | |
| CEP290- | + | AACAAGUUUUGAAACAGGAA (SEQ ID | 20 | downstream |
| 1383 | | NO: 809) | | |
| CEP290- | + | ACAAGUUUUGAAACAGGAA (SEQ ID | 19 | downstream |
| 1384 | | NO: 2191) | | |
| CEP290- | + | AAUGCCUGAACAAGUUUUGAAA (SEQ | 22 | downstream |
| 1385 | | ID NO: 2192) | | |
| CEP290- | + | AUGCCUGAACAAGUUUUGAAA (SEQ ID | 21 | downstream |
| 1386 | | NO: 2193) | | |
| CEP290- | + | AUUCACUGAGCAAAACAACUGGAA | 24 | downstream |
| 1387 | | (SEQ ID NO: 2194) | | |
| CEP290- | + | ACUGAGCAAAACAACUGGAA (SEQ ID | 20 | downstream |
| 1388 | | NO: 819) | | |
| CEP290- | + | AAAAAGGUAAUGCCUGAACAAGUU | 24 | downstream |
| 1389 | | (SEQ ID NO: 2196) | | |
| CEP290- | + | AAAAGGUAAUGCCUGAACAAGUU | 23 | downstream |
| 1390 | | (SEQ ID NO: 2197) | | |
| CEP290- | + | AAAGGUAAUGCCUGAACAAGUU (SEQ | 22 | downstream |
| 1391 | | ID NO: 2198) | | |
| CEP290- | + | AAGGUAAUGCCUGAACAAGUU (SEQ ID | 21 | downstream |
| 1392 | | NO: 2199) | | |
| CEP290- | + | AGGUAAUGCCUGAACAAGUU (SEQ ID | 20 | downstream |
| 1393 | | NO: 828) | | |
| CEP290- | − | ACGUGCUCUUUUCUAUAUA (SEQ ID | 19 | downstream |
| 1394 | | NO: 2201) | | |
| CEP290- | + | AUUAUCUAUUCCAUUCUUCACAC (SEQ | 23 | downstream |
| 1395 | | ID NO: 2202) | | |
| CEP290- | + | AUCUAUUCCAUUCUUCACAC (SEQ ID | 20 | downstream |
| 1396 | | NO: 2203) | | |
| CEP290- | + | AAGAGAGAAAUGGUUCCCUAUAUA | 24 | downstream |
| 1397 | | (SEQ ID NO: 2204) | | |
| CEP290- | + | AGAGAGAAAUGGUUCCCUAUAUA | 23 | downstream |
| 1398 | | (SEQ ID NO: 2205) | | |
| CEP290- | + | AGAGAAAUGGUUCCCUAUAUA (SEQ ID | 21 | downstream |
| 1399 | | NO: 2206) | | |
| CEP290- | + | AGAAAUGGUUCCCUAUAUA (SEQ ID | 19 | downstream |
| 1400 | | NO: 2207) | | |
| CEP290- | − | AGGAAAUUAUUGUUGCUUU (SEQ ID | 19 | downstream |
| 1401 | | NO: 2208) | | |
| CEP290- | + | ACUGAGCAAAACAACUGGAAGA (SEQ | 22 | downstream |
| 1402 | | ID NO: 2209) | | |
| CEP290- | + | AGCAAAACAACUGGAAGA (SEQ ID NO: | 18 | downstream |
| 1403 | | 2210) | | |
| CEP290- | + | AUACAUAAGAAAGAACACUGUGGU | 24 | downstream |
| 1404 | | (SEQ ID NO: 2211) | | |
| CEP290- | + | ACAUAAGAAAGAACACUGUGGU (SEQ | 22 | downstream |
| 1405 | | ID NO: 2212) | | |
| CEP290- | + | AUAAGAAAGAACACUGUGGU (SEQ ID | 20 | downstream |
| 1406 | | NO: 829) | | |
| CEP290- | + | AAGAAAGAACACUGUGGU (SEQ ID NO: | 18 | downstream |
| 1407 | | 2214) | | |
| CEP290- | − | AAGAAUGGAAUAGAUAAU (SEQ ID NO: | 18 | downstream |
| 1408 | | 2215) | | |
| CEP290- | + | AAGGAGGAUGUAAGACUGGAGA (SEQ | 22 | downstream |
| 1409 | | ID NO: 2216) | | |
| CEP290- | + | AGGAGGAUGUAAGACUGGAGA (SEQ | 21 | downstream |
| 1410 | | ID NO: 2217) | | |
| CEP290- | + | AGGAUGUAAGACUGGAGA (SEQ ID NO: | 18 | downstream |
| 1411 | | 2218) | | |
| CEP290- | − | AAAAACUUGAAAUUUGAUAGUAG | 23 | downstream |
| 1412 | | (SEQ ID NO: 2219) | | |
| CEP290- | − | AAAACUUGAAAUUUGAUAGUAG (SEQ | 22 | downstream |
| 1413 | | ID NO: 2220) | | |
| CEP290- | − | AAACUUGAAAUUUGAUAGUAG (SEQ | 21 | downstream |
| 1414 | | ID NO: 2221) | | |
| CEP290- | − | AACUUGAAAUUUGAUAGUAG (SEQ ID | 20 | downstream |
| 1415 | | NO: 2222) | | |
| CEP290- | − | ACUUGAAAUUUGAUAGUAG (SEQ ID | 19 | downstream |
| 1416 | | NO: 2223) | | |
| CEP290- | − | ACAUAUCUGUCUUCCUUA (SEQ ID NO: | 18 | downstream |
| 1417 | | 2224) | | |
| CEP290- | + | AUUAAAAAAAGUAUGCUU (SEQ ID NO: | 18 | downstream |
| 1418 | | 2225) | | |
| CEP290- | + | AUAUCAAAAGACUUAUAUUCCAUU | 24 | downstream |
| 1419 | | (SEQ ID NO: 2226) | | |
| CEP290- | + | AUCAAAAGACUUAUAUUCCAUU (SEQ | 22 | downstream |
| 1420 | | ID NO: 2227) | | |
| CEP290- | + | AAAAGACUUAUAUUCCAUU (SEQ ID | 19 | downstream |
| 1421 | | NO: 2228) | | |
| CEP290- | + | AAAGACUUAUAUUCCAUU (SEQ ID NO: | 18 | downstream |
| 1422 | | 2229) | | |
| CEP290- | − | AAAAUCAGAUUUCAUGUGUGAAGA | 24 | downstream |
| 1423 | | (SEQ ID NO: 2230) | | |
| CEP290- | − | AAAUCAGAUUUCAUGUGUGAAGA | 23 | downstream |
| 1424 | | (SEQ ID NO: 2231) | | |
| CEP290- | − | AAUCAGAUUUCAUGUGUGAAGA (SEQ | 22 | downstream |
| 1425 | | ID NO: 2232) | | |
| CEP290- | − | AUCAGAUUUCAUGUGUGAAGA (SEQ ID | 21 | downstream |
| 1426 | | NO: 2233) | | |
| CEP290- | − | AGAUUUCAUGUGUGAAGA (SEQ ID NO: | 18 | downstream |
| 1427 | | 2234) | | |
| CEP290- | − | AAUGGAAUAUAAGUCUUUUGAUAU | 24 | downstream |
| 1428 | | (SEQ ID NO: 2235) | | |
| CEP290- | − | AUGGAAUAUAAGUCUUUUGAUAU | 23 | downstream |
| 1429 | | (SEQ ID NO: 2236) | | |
| CEP290- | − | AAUAUAAGUCUUUUGAUAU (SEQ ID | 19 | downstream |
| 1430 | | NO: 2237) | | |
| CEP290- | − | AUAUAAGUCUUUUGAUAU (SEQ ID NO: | 18 | downstream |
| 1431 | | 2238) | | |
| CEP290- | − | AAGAAUGGAAUAGAUAAUA (SEQ ID | 19 | downstream |
| 1432 | | NO: 2239) | | |
| CEP290- | − | AGAAUGGAAUAGAUAAUA (SEQ ID NO: | 18 | downstream |
| 1433 | | 2240) | | |
| CEP290- | − | AAAACUGGAUGGGUAAUAAAGCAA | 24 | downstream |
| 1434 | | (SEQ ID NO: 2241) | | |
| CEP290- | − | AAACUGGAUGGGUAAUAAAGCAA | 23 | downstream |
| 1435 | | (SEQ ID NO: 2242) | | |
| CEP290- | − | AACUGGAUGGGUAAUAAAGCAA (SEQ | 22 | downstream |
| 1436 | | ID NO: 2243) | | |
| CEP290- | − | ACUGGAUGGGUAAUAAAGCAA (SEQ ID | 21 | downstream |
| 1437 | | NO: 2244) | | |
| CEP290- | + | AUAGAAAUUCACUGAGCAAAACAA | 24 | downstream |
| 1438 | | (SEQ ID NO: 2245) | | |
| CEP290- | + | AGAAAUUCACUGAGCAAAACAA (SEQ | 22 | downstream |
| 1439 | | ID NO: 2246) | | |
| CEP290- | + | AAAUUCACUGAGCAAAACAA (SEQ ID | 20 | downstream |
| 1440 | | NO: 808) | | |
| CEP290- | + | AAUUCACUGAGCAAAACAA (SEQ ID | 19 | downstream |
| 1441 | | NO: 2248) | | |
| CEP290- | + | AUUCACUGAGCAAAACAA (SEQ ID NO: | 18 | downstream |
| 1442 | | 2249) | | |
| CEP290- | + | AGGAUGUAAGACUGGAGAUAGAGA | 24 | downstream |
| 1443 | | (SEQ ID NO: 2250) | | |
| CEP290- | + | AUGUAAGACUGGAGAUAGAGA (SEQ | 21 | downstream |
| 1444 | | ID NO: 2251) | | |
| CEP290- | − | AAAUUUGAUAGUAGAAGAAAA (SEQ | 21 | downstream |
| 1445 | | ID NO: 2252) | | |
| CEP290- | − | AAUUUGAUAGUAGAAGAAAA (SEQ ID | 20 | downstream |
| 1446 | | NO: 2253) | | |
| CEP290- | − | AUUUGAUAGUAGAAGAAAA (SEQ ID | 19 | downstream |
| 1447 | | NO: 2254) | | |
| CEP290- | + | AAAAUAAAACUAAGACACUGCCAA | 24 | downstream |
| 1448 | | (SEQ ID NO: 1036) | | |
| CEP290- | + | AAAUAAAACUAAGACACUGCCAA (SEQ | 23 | downstream |
| 1449 | | ID NO: 1037) | | |
| CEP290- | + | AAUAAAACUAAGACACUGCCAA (SEQ | 22 | downstream |
| 1450 | | ID NO: 1038) | | |
| CEP290- | + | AUAAAACUAAGACACUGCCAA (SEQ ID | 21 | downstream |
| 1451 | | NO: 1039) | | |
| CEP290- | + | AAAACUAAGACACUGCCAA (SEQ ID | 19 | downstream |
| 1452 | | NO: 1040) | | |
| CEP290- | + | AAACUAAGACACUGCCAA (SEQ ID NO: | 18 | downstream |
| 1453 | | 1041) | | |
| CEP290- | − | AAUAAAGCAAAAGAAAAAC (SEQ ID | 19 | downstream |
| 1454 | | NO: 2261) | | |
| CEP290- | − | AUAAAGCAAAAGAAAAAC (SEQ ID NO: | 18 | downstream |
| 1455 | | 2262) | | |
| CEP290- | − | AUUCUUUUUUUGUUGUUUUUUUUU | 24 | downstream |
| 1456 | | (SEQ ID NO: 2263) | | |
| CEP290- | + | ACUCCAGCCUGGGCAACACA (SEQ ID | 20 | downstream |
| 1457 | | NO: 2264) | | |
| CEP290- | − | CUUACCUCAUGUCAUCUAGAGC (SEQ | 22 | downstream |
| 1458 | | ID NO: 2265) | | |
| CEP290- | − | CCUCAUGUCAUCUAGAGC (SEQ ID NO: | 18 | downstream |
| 1459 | | 2266) | | |
| CEP290- | + | CAGUUUUUAAGGCGGGGAGUCAC (SEQ | 23 | downstream |
| 1460 | | ID NO: 2267) | | |
| CEP290- | − | CACAGAGUUCAAGCUAAUAC (SEQ ID | 20 | downstream |
| 1461 | | NO: 845) | | |
| CEP290- | − | CAGAGUUCAAGCUAAUAC (SEQ ID NO: | 18 | downstream |
| 1462 | | 2269) | | |
| CEP290- | + | CUUGAACUCUGUGCCAAAC (SEQ ID | 19 | downstream |
| 1463 | | NO: 2270) | | |
| CEP290- | − | CAUGUGGUGUCAAAUAUGGUGCU | 23 | downstream |
| 1464 | | (SEQ ID NO: 2271) | | |
| CEP290- | − | CAUGUGGUGUCAAAUAUGGUGCUU | 24 | downstream |
| 1465 | | (SEQ ID NO: 2272) | | |
| CEP290- | + | CUCUAGAUGACAUGAGGUAAGU (SEQ | 22 | downstream |
| 1466 | | ID NO: 2273) | | |
| CEP290- | + | CUAGAUGACAUGAGGUAAGU (SEQ ID | 20 | downstream |
| 1467 | | NO: 671) | | |
| CEP290- | − | CUAAUACAUGAGAGUGAUUAGUGG | 24 | downstream |
| 1468 | | (SEQ ID NO: 2275) | | |
| CEP290- | − | CAUGAGAGUGAUUAGUGG (SEQ ID NO: | 18 | downstream |
| 1469 | | 2276) | | |
| CEP290-509 | + | CACUGCCAAUAGGGAUAGGU (SEQ ID | 20 | downstream |
| | | NO: 613) | | |
| CEP290-511 | + | CUGCCAAUAGGGAUAGGU (SEQ ID NO: | 18 | downstream |
| | | 1046) | | |
| CEP290- | + | CCAAACAGGAGAUACUCAACACA (SEQ | 23 | downstream |
| 1470 | | ID NO: 2278) | | |
| CEP290- | + | CAAACAGGAGAUACUCAACACA (SEQ | 22 | downstream |
| 1471 | | ID NO: 2279) | | |
| CEP290- | + | CAGGAGAUACUCAACACA (SEQ ID NO: | 18 | downstream |
| 1472 | | 2280) | | |
| CEP290- | + | CACGUACAAAAGAACAUACAU (SEQ ID | 21 | downstream |
| 1473 | | NO: 2281) | | |
| CEP290- | + | CGUACAAAAGAACAUACAU (SEQ ID | 19 | downstream |
| 1474 | | NO: 2282) | | |
| CEP290- | + | CAGUAAGGAGGAUGUAAGAC (SEQ ID | 20 | downstream |
| 1475 | | NO: 676) | | |
| CEP290- | + | CUUUUGACAGUUUUUAAGG (SEQ ID | 19 | downstream |
| 1476 | | NO: 2284) | | |
| CEP290- | − | CGUGCUCUUUUCUAUAUAU (SEQ ID | 19 | downstream |
| 1477 | | NO: 2285) | | |
| CEP290- | + | CACUGAGCAAAACAACUGG (SEQ ID | 19 | downstream |
| 1478 | | NO: 2286) | | |
| CEP290- | + | CCUGAACAAGUUUUGAAACAGGAA | 24 | downstream |
| 1479 | | (SEQ ID NO: 2287) | | |
| CEP290- | + | CUGAACAAGUUUUGAAACAGGAA | 23 | downstream |
| 1480 | | (SEQ ID NO: 2288) | | |
| CEP290- | + | CAAGUUUUGAAACAGGAA (SEQ ID NO: | 18 | downstream |
| 1481 | | 2289) | | |
| CEP290- | + | CCUGAACAAGUUUUGAAA (SEQ ID NO: | 18 | downstream |
| 1482 | | 2290) | | |
| CEP290- | + | CACUGAGCAAAACAACUGGAA (SEQ ID | 21 | downstream |
| 1483 | | NO: 2291) | | |
| CEP290- | + | CUGAGCAAAACAACUGGAA (SEQ ID | 19 | downstream |
| 1484 | | NO: 2292) | | |
| CEP290- | − | CGUGCUCUUUUCUAUAUA (SEQ ID NO: | 18 | downstream |
| 1485 | | 2293) | | |
| CEP290- | + | CUAUUCCAUUCUUCACAC (SEQ ID NO: | 18 | downstream |
| 1486 | | 2294) | | |
| CEP290- | − | CUUAGGAAAUUAUUGUUGCUUU (SEQ | 22 | downstream |
| 1487 | | ID NO: 2295) | | |
| CEP290- | − | CUUUUUGAGAGGUAAAGGUUC (SEQ ID | 21 | downstream |
| 1488 | | NO: 2296) | | |
| CEP290- | + | CACUGAGCAAAACAACUGGAAGA (SEQ | 23 | downstream |
| 1489 | | ID NO: 2297) | | |
| CEP290- | + | CUGAGCAAAACAACUGGAAGA (SEQ ID | 21 | downstream |
| 1490 | | NO: 2298) | | |
| CEP290- | + | CAUAAGAAAGAACACUGUGGU (SEQ ID | 21 | downstream |
| 1491 | | NO: 2299) | | |
| CEP290- | − | CUUGAAAUUUGAUAGUAG (SEQ ID NO: | 18 | downstream |
| 1492 | | 2300) | | |
| CEP290- | + | CCAUUAAAAAAAGUAUGCUU (SEQ ID | 20 | downstream |
| 1493 | | NO: 857) | | |
| CEP290- | + | CAUUAAAAAAAGUAUGCUU (SEQ ID | 19 | downstream |
| 1494 | | NO: 2302) | | |
| CEP290- | + | CAAAAGACUUAUAUUCCAUU (SEQ ID | 20 | downstream |
| 1495 | | NO: 842) | | |
| CEP290- | − | CAGAUUUCAUGUGUGAAGA (SEQ ID | 19 | downstream |
| 1496 | | NO: 2304) | | |
| CEP290- | − | CUGGAUGGGUAAUAAAGCAA (SEQ ID | 20 | downstream |
| 1497 | | NO: 2305) | | |
| CEP290- | − | CUUAAGCAUACUUUUUUUUUA (SEQ ID | 19 | downstream |
| 1498 | | NO: 2306) | | |
| CEP290- | − | CUUUUUUUGUUGUUUUUUUUU (SEQ | 21 | downstream |
| 1499 | | ID NO: 2307) | | |
| CEP290- | + | CUGCACUCCAGCCUGGGCAACACA | 24 | downstream |
| 1500 | | (SEQ ID NO: 2308) | | |
| CEP290- | + | CACUCCAGCCUGGGCAACACA (SEQ ID | 21 | downstream |
| 1501 | | NO: 2309) | | |
| CEP290- | + | CUCCAGCCUGGGCAACACA (SEQ ID | 19 | downstream |
| 1502 | | NO: 2310) | | |
| CEP290- | + | GUUUUUAAGGCGGGGAGUCAC (SEQ ID | 21 | downstream |
| 1503 | | NO: 2311) | | |
| CEP290-230 | − | GGCACAGAGUUCAAGCUAAUAC (SEQ | 22 | downstream |
| | | ID NO: 2312) | | |
| CEP290- | − | GCACAGAGUUCAAGCUAAUAC (SEQ ID | 21 | downstream |
| 1504 | | NO: 2313) | | |
| CEP290- | + | GCUUGAACUCUGUGCCAAAC (SEQ ID | 20 | downstream |
| 1505 | | NO: 461) | | |
| CEP290-139 | − | GCAUGUGGUGUCAAAUAUGGUGCU | 24 | downstream |
| | | (SEQ ID NO: 2314) | | |
| CEP290- | − | GUGGUGUCAAAUAUGGUGCU (SEQ ID | 20 | downstream |
| 1506 | | NO: 782) | | |
| CEP290- | − | GGUGUCAAAUAUGGUGCU (SEQ ID NO: | 18 | downstream |
| 1507 | | 2316) | | |
| CEP290- | − | GUGGUGUCAAAUAUGGUGCUU (SEQ ID | 21 | downstream |
| 1508 | | NO: 2317) | | |
| CEP290- | − | GGUGUCAAAUAUGGUGCUU (SEQ ID | 19 | downstream |
| 1509 | | NO: 2318) | | |
| CEP290- | − | GUGUCAAAUAUGGUGCUU (SEQ ID NO: | 18 | downstream |
| 1510 | | 2319) | | |
| CEP290- | + | GCUCUAGAUGACAUGAGGUAAGU | 23 | downstream |
| 1511 | | (SEQ ID NO: 2320) | | |
| CEP290-11 | + | GACACUGCCAAUAGGGAUAGGU (SEQ | 22 | downstream |
| | | ID NO: 1047) | | |
| CEP290- | − | GGUUCAUGAGACUAGAGGUC (SEQ ID | 20 | downstream |
| 1512 | | NO: 2322) | | |
| CEP290- | − | GUUCAUGAGACUAGAGGUC (SEQ ID | 19 | downstream |
| 1513 | | NO: 2323) | | |
| CEP290- | + | GCCAAACAGGAGAUACUCAACACA | 24 | downstream |
| 1514 | | (SEQ ID NO: 2324) | | |
| CEP290- | + | GAGCACGUACAAAAGAACAUACAU | 24 | downstream |
| 1515 | | (SEQ ID NO: 2325) | | |
| CEP290- | + | GCACGUACAAAAGAACAUACAU (SEQ | 22 | downstream |
| 1516 | | ID NO: 2326) | | |
| CEP290- | + | GUACAAAAGAACAUACAU (SEQ ID NO: | 18 | downstream |
| 1517 | | 2327) | | |
| CEP290- | + | GUGGCAGUAAGGAGGAUGUAAGAC | 24 | downstream |
| 1518 | | (SEQ ID NO: 2328) | | |
| CEP290- | + | GGCAGUAAGGAGGAUGUAAGAC (SEQ | 22 | downstream |
| 1519 | | ID NO: 2329) | | |
| CEP290- | + | GCAGUAAGGAGGAUGUAAGAC (SEQ ID | 21 | downstream |
| 1520 | | NO: 2330) | | |
| CEP290- | + | GUAAGGAGGAUGUAAGAC (SEQ ID NO: | 18 | downstream |
| 1521 | | 2331) | | |
| CEP290- | + | GGUAGCUUUUGACAGUUUUUAAGG | 24 | downstream |
| 1522 | | (SEQ ID NO: 2332) | | |
| CEP290- | + | GUAGCUUUUGACAGUUUUUAAGG | 23 | downstream |
| 1523 | | (SEQ ID NO: 2333) | | |
| CEP290- | + | GCUUUUGACAGUUUUUAAGG (SEQ ID | 20 | downstream |
| 1524 | | NO: 482) | | |
| CEP290- | − | GUACGUGCUCUUUUCUAUAUAU (SEQ | 22 | downstream |
| 1525 | | ID NO: 2334) | | |
| CEP290- | − | GUGCUCUUUUCUAUAUAU (SEQ ID NO: | 18 | downstream |
| 1526 | | 2335) | | |
| CEP290- | + | GAACAAGUUUUGAAACAGGAA (SEQ ID | 21 | downstream |
| 1527 | | NO: 2336) | | |
| CEP290- | + | GUAAUGCCUGAACAAGUUUUGAAA | 24 | downstream |
| 1528 | | (SEQ ID NO: 2337) | | |
| CEP290- | + | GCCUGAACAAGUUUUGAAA (SEQ ID | 19 | downstream |
| 1529 | | NO: 2338) | | |
| CEP290- | + | GGUAAUGCCUGAACAAGUU (SEQ ID | 19 | downstream |
| 1530 | | NO: 2339) | | |
| CEP290- | + | GUAAUGCCUGAACAAGUU (SEQ ID NO: | 18 | downstream |
| 1531 | | 2340) | | |
| CEP290- | − | GUACGUGCUCUUUUCUAUAUA (SEQ ID | 21 | downstream |
| 1532 | | NO: 2341) | | |
| CEP290- | + | GAGAGAAAUGGUUCCCUAUAUA (SEQ | 22 | downstream |
| 1533 | | ID NO: 2342) | | |
| CEP290- | + | GAGAAAUGGUUCCCUAUAUA (SEQ ID | 20 | downstream |
| 1534 | | NO: 771) | | |
| CEP290- | + | GAAAUGGUUCCCUAUAUA (SEQ ID NO: | 18 | downstream |
| 1535 | | 2344) | | |
| CEP290- | − | GCUUAGGAAAUUAUUGUUGCUUU | 23 | downstream |
| 1536 | | (SEQ ID NO: 2345) | | |
| CEP290- | − | GGAAAUUAUUGUUGCUUU (SEQ ID NO: | 18 | downstream |
| 1537 | | 2346) | | |
| CEP290- | − | GCUUUUUGAGAGGUAAAGGUUC (SEQ | 22 | downstream |
| 1538 | | ID NO: 2347) | | |
| CEP290- | + | GAGCAAAACAACUGGAAGA (SEQ ID | 19 | downstream |
| 1539 | | NO: 2348) | | |
| CEP290- | − | GUGUGAAGAAUGGAAUAGAUAAU | 23 | downstream |
| 1540 | | (SEQ ID NO: 2349) | | |
| CEP290- | − | GUGAAGAAUGGAAUAGAUAAU (SEQ | 21 | downstream |
| 1541 | | ID NO: 2350) | | |
| CEP290- | − | GAAGAAUGGAAUAGAUAAU (SEQ ID | 19 | downstream |
| 1542 | | NO: 2351) | | |
| CEP290- | + | GUAAGGAGGAUGUAAGACUGGAGA | 24 | downstream |
| 1543 | | (SEQ ID NO: 2352) | | |
| CEP290- | + | GGAGGAUGUAAGACUGGAGA (SEQ ID | 20 | downstream |
| 1544 | | NO: 779) | | |
| CEP290- | + | GAGGAUGUAAGACUGGAGA (SEQ ID | 19 | downstream |
| 1545 | | NO: 2354) | | |
| CEP290- | − | GAAAAACUUGAAAUUUGAUAGUAG | 24 | downstream |
| 1546 | | (SEQ ID NO: 2355) | | |
| CEP290- | − | GUGUUUACAUAUCUGUCUUCCUUA | 24 | downstream |
| 1547 | | (SEQ ID NO: 2356) | | |
| CEP290- | − | GUUUACAUAUCUGUCUUCCUUA (SEQ | 22 | downstream |
| 1548 | | ID NO: 2357) | | |
| CEP290- | + | GUUCCAUUAAAAAAAGUAUGCUU | 23 | downstream |
| 1549 | | (SEQ ID NO: 2358) | | |
| CEP290- | − | GGAAUAUAAGUCUUUUGAUAU (SEQ | 21 | downstream |
| 1550 | | ID NO: 2359) | | |
| CEP290- | − | GAAUAUAAGUCUUUUGAUAU (SEQ ID | 20 | downstream |
| 1551 | | NO: 770) | | |
| CEP290- | − | GUGUGAAGAAUGGAAUAGAUAAUA | 24 | downstream |
| 1552 | | (SEQ ID NO: 2361) | | |
| CEP290- | − | GUGAAGAAUGGAAUAGAUAAUA (SEQ | 22 | downstream |
| 1553 | | ID NO: 2362) | | |
| CEP290- | − | GAAGAAUGGAAUAGAUAAUA (SEQ ID | 20 | downstream |
| 1554 | | NO: 467) | | |
| CEP290- | − | GGAUGGGUAAUAAAGCAA (SEQ ID NO: | 18 | downstream |
| 1555 | | 2363) | | |
| CEP290- | + | GAAAUUCACUGAGCAAAACAA (SEQ ID | 21 | downstream |
| 1556 | | NO: 2364) | | |
| CEP290- | + | GGAUGUAAGACUGGAGAUAGAGA | 23 | downstream |
| 1557 | | (SEQ ID NO: 2365) | | |
| CEP290- | + | GAUGUAAGACUGGAGAUAGAGA (SEQ | 22 | downstream |
| 1558 | | ID NO: 2366) | | |
| CEP290- | + | GUAAGACUGGAGAUAGAGA (SEQ ID | 19 | downstream |
| 1559 | | NO: 2367) | | |
| CEP290- | − | GAAAUUUGAUAGUAGAAGAAAA (SEQ | 22 | downstream |
| 1560 | | ID NO: 2368) | | |
| CEP290- | − | GGGUAAUAAAGCAAAAGAAAAAC | 23 | downstream |
| 1561 | | (SEQ ID NO: 2369) | | |
| CEP290- | − | GGUAAUAAAGCAAAAGAAAAAC (SEQ | 22 | downstream |
| 1562 | | ID NO: 2370) | | |
| CEP290- | − | GUAAUAAAGCAAAAGAAAAAC (SEQ ID | 21 | downstream |
| 1563 | | NO: 2371) | | |
| CEP290- | + | GCACUCCAGCCUGGGCAACACA (SEQ | 22 | downstream |
| 1564 | | ID NO: 2372) | | |
| CEP290- | − | UACUUACCUCAUGUCAUCUAGAGC | 24 | downstream |
| 1565 | | (SEQ ID NO: 2373) | | |
| CEP290- | − | UUACCUCAUGUCAUCUAGAGC (SEQ ID | 21 | downstream |
| 1566 | | NO: 2374) | | |
| CEP290- | − | UACCUCAUGUCAUCUAGAGC (SEQ ID | 20 | downstream |
| 1567 | | NO: 876) | | |
| CEP290- | + | UUUUUAAGGCGGGGAGUCAC (SEQ ID | 20 | downstream |
| 1568 | | NO: 909) | | |
| CEP290- | + | UUUUAAGGCGGGGAGUCAC (SEQ ID | 19 | downstream |
| 1569 | | NO: 2377) | | |
| CEP290- | + | UUUAAGGCGGGGAGUCAC (SEQ ID NO: | 18 | downstream |
| 1570 | | 2378) | | |
| CEP290- | − | UUGGCACAGAGUUCAAGCUAAUAC | 24 | downstream |
| 1571 | | (SEQ ID NO: 2379) | | |
| CEP290- | − | UGGCACAGAGUUCAAGCUAAUAC (SEQ | 23 | downstream |
| 1572 | | ID NO: 2380) | | |
| CEP290- | + | UUAGCUUGAACUCUGUGCCAAAC (SEQ | 23 | downstream |
| 1573 | | ID NO: 2381) | | |
| CEP290- | + | UAGCUUGAACUCUGUGCCAAAC (SEQ | 22 | downstream |
| 1574 | | ID NO: 2382) | | |
| CEP290- | + | UUGAACUCUGUGCCAAAC (SEQ ID NO: | 18 | downstream |
| 1575 | | 2383) | | |
| CEP290- | − | UGUGGUGUCAAAUAUGGUGCU (SEQ ID | 21 | downstream |
| 1576 | | NO: 2384) | | |
| CEP290- | − | UGGUGUCAAAUAUGGUGCU (SEQ ID | 19 | downstream |
| 1577 | | NO: 2385) | | |
| CEP290- | − | UGUGGUGUCAAAUAUGGUGCUU (SEQ | 22 | downstream |
| 1578 | | ID NO: 2386) | | |
| CEP290- | − | UGGUGUCAAAUAUGGUGCUU (SEQ ID | 20 | downstream |
| 1579 | | NO: 625) | | |
| CEP290- | + | UGCUCUAGAUGACAUGAGGUAAGU | 24 | downstream |
| 1580 | | (SEQ ID NO: 2388) | | |
| CEP290- | + | UCUAGAUGACAUGAGGUAAGU (SEQ ID | 21 | downstream |
| 1581 | | NO: 2389) | | |
| CEP290- | + | UAGAUGACAUGAGGUAAGU (SEQ ID | 19 | downstream |
| 1582 | | NO: 2390) | | |
| CEP290- | − | UAAUACAUGAGAGUGAUUAGUGG | 23 | downstream |
| 1583 | | (SEQ ID NO: 2391) | | |
| CEP290- | − | UACAUGAGAGUGAUUAGUGG (SEQ ID | 20 | downstream |
| 1584 | | NO: 628) | | |
| CEP290- | − | UAAAGGUUCAUGAGACUAGAGGUC | 24 | downstream |
| 1585 | | (SEQ ID NO: 2392) | | |
| CEP290- | − | UUCAUGAGACUAGAGGUC (SEQ ID NO: | 18 | downstream |
| 1586 | | 2393) | | |
| CEP290- | + | UGGCAGUAAGGAGGAUGUAAGAC | 23 | downstream |
| 1587 | | (SEQ ID NO: 2394) | | |
| CEP290- | + | UAGCUUUUGACAGUUUUUAAGG (SEQ | 22 | downstream |
| 1588 | | ID NO: 2395) | | |
| CEP290- | + | UUUUGACAGUUUUUAAGG (SEQ ID NO: | 18 | downstream |
| 1589 | | 2396) | | |
| CEP290- | − | UUGUACGUGCUCUUUUCUAUAUAU | 24 | downstream |
| 1590 | | (SEQ ID NO: 2397) | | |
| CEP290- | − | UGUACGUGCUCUUUUCUAUAUAU (SEQ | 23 | downstream |
| 1591 | | ID NO: 2398) | | |
| CEP290- | − | UACGUGCUCUUUUCUAUAUAU (SEQ ID | 21 | downstream |
| 1592 | | NO: 2399) | | |
| CEP290- | + | UUCACUGAGCAAAACAACUGG (SEQ ID | 21 | downstream |
| 1593 | | NO: 2400) | | |
| CEP290- | + | UCACUGAGCAAAACAACUGG (SEQ ID | 20 | downstream |
| 1594 | | NO: 883) | | |
| CEP290- | + | UGAACAAGUUUUGAAACAGGAA (SEQ | 22 | downstream |
| 1595 | | ID NO: 2402) | | |
| CEP290- | + | UAAUGCCUGAACAAGUUUUGAAA | 23 | downstream |
| 1596 | | (SEQ ID NO: 2403) | | |
| CEP290- | + | UGCCUGAACAAGUUUUGAAA (SEQ ID | 20 | downstream |
| 1597 | | NO: 897) | | |
| CEP290- | + | UUCACUGAGCAAAACAACUGGAA (SEQ | 23 | downstream |
| 1598 | | ID NO: 2405) | | |
| CEP290- | + | UCACUGAGCAAAACAACUGGAA (SEQ | 22 | downstream |
| 1599 | | ID NO: 2406) | | |
| CEP290- | + | UGAGCAAAACAACUGGAA (SEQ ID NO: | 18 | downstream |
| 1600 | | 2407) | | |
| CEP290- | − | UUUGUACGUGCUCUUUUCUAUAUA | 24 | downstream |
| 1601 | | (SEQ ID NO: 2408) | | |
| CEP290- | − | UUGUACGUGCUCUUUUCUAUAUA (SEQ | 23 | downstream |
| 1602 | | ID NO: 2409) | | |
| CEP290- | − | UGUACGUGCUCUUUUCUAUAUA (SEQ | 22 | downstream |
| 1603 | | ID NO: 2410) | | |
| CEP290- | − | UACGUGCUCUUUUCUAUAUA (SEQ ID | 20 | downstream |
| 1604 | | NO: 877) | | |
| CEP290- | + | UAUUAUCUAUUCCAUUCUUCACAC | 24 | downstream |
| 1605 | | (SEQ ID NO: 2412) | | |
| CEP290- | + | UUAUCUAUUCCAUUCUUCACAC (SEQ | 22 | downstream |
| 1606 | | ID NO: 2413) | | |
| CEP290- | + | UAUCUAUUCCAUUCUUCACAC (SEQ ID | 21 | downstream |
| 1607 | | NO: 2414) | | |
| CEP290- | + | UCUAUUCCAUUCUUCACAC (SEQ ID | 19 | downstream |
| 1608 | | NO: 2415) | | |
| CEP290- | − | UGCUUAGGAAAUUAUUGUUGCUUU | 24 | downstream |
| 1609 | | (SEQ ID NO: 2416) | | |
| CEP290- | − | UUAGGAAAUUAUUGUUGCUUU (SEQ | 21 | downstream |
| 1610 | | ID NO: 2417) | | |
| CEP290- | − | UAGGAAAUUAUUGUUGCUUU (SEQ ID | 20 | downstream |
| 1611 | | NO: 2418) | | |
| CEP290- | − | UUGCUUUUUGAGAGGUAAAGGUUC | 24 | downstream |
| 1612 | | (SEQ ID NO: 2419) | | |
| CEP290- | − | UGCUUUUUGAGAGGUAAAGGUUC | 23 | downstream |
| 1613 | | (SEQ ID NO: 2420) | | |
| CEP290- | − | UUUUUGAGAGGUAAAGGUUC (SEQ ID | 20 | downstream |
| 1614 | | NO: 2421) | | |
| CEP290- | − | UUUUGAGAGGUAAAGGUUC (SEQ ID | 19 | downstream |
| 1615 | | NO: 2422) | | |
| CEP290- | − | UUUGAGAGGUAAAGGUUC (SEQ ID NO: | 18 | downstream |
| 1616 | | 2423) | | |
| CEP290- | + | UCACUGAGCAAAACAACUGGAAGA | 24 | downstream |
| 1617 | | (SEQ ID NO: 2424) | | |
| CEP290- | + | UGAGCAAAACAACUGGAAGA (SEQ ID | 20 | downstream |
| 1618 | | NO: 894) | | |
| CEP290- | + | UACAUAAGAAAGAACACUGUGGU | 23 | downstream |
| 1619 | | (SEQ ID NO: 2426) | | |
| CEP290- | + | UAAGAAAGAACACUGUGGU (SEQ ID | 19 | downstream |
| 1620 | | NO: 2427) | | |
| CEP290- | − | UGUGUGAAGAAUGGAAUAGAUAAU | 24 | downstream |
| 1621 | | (SEQ ID NO: 2428) | | |
| CEP290- | − | UGUGAAGAAUGGAAUAGAUAAU (SEQ | 22 | downstream |
| 1622 | | ID NO: 2429) | | |
| CEP290- | − | UGAAGAAUGGAAUAGAUAAU (SEQ ID | 20 | downstream |
| 1623 | | NO: 2430) | | |
| CEP290- | + | UAAGGAGGAUGUAAGACUGGAGA | 23 | downstream |
| 1624 | | (SEQ ID NO: 2431) | | |
| CEP290- | − | UGUUUACAUAUCUGUCUUCCUUA (SEQ | 23 | downstream |
| 1625 | | ID NO: 2432) | | |
| CEP290- | − | UUUACAUAUCUGUCUUCCUUA (SEQ ID | 21 | downstream |
| 1626 | | NO: 2433) | | |
| CEP290- | − | UUACAUAUCUGUCUUCCUUA (SEQ ID | 20 | downstream |
| 1627 | | NO: 901) | | |
| CEP290- | − | UACAUAUCUGUCUUCCUUA (SEQ ID | 19 | downstream |
| 1628 | | NO: 2435) | | |
| CEP290- | + | UGUUCCAUUAAAAAAAGUAUGCUU | 24 | downstream |
| 1629 | | (SEQ ID NO: 2436) | | |
| CEP290- | + | UUCCAUUAAAAAAAGUAUGCUU (SEQ | 22 | downstream |
| 1630 | | ID NO: 2437) | | |
| CEP290- | + | UCCAUUAAAAAAAGUAUGCUU (SEQ ID | 21 | downstream |
| 1631 | | NO: 2438) | | |
| CEP290- | + | UAUCAAAAGACUUAUAUUCCAUU (SEQ | 23 | downstream |
| 1632 | | ID NO: 2439) | | |
| CEP290- | + | UCAAAAGACUUAUAUUCCAUU (SEQ ID | 21 | downstream |
| 1633 | | NO: 2440) | | |
| CEP290- | − | UCAGAUUUCAUGUGUGAAGA (SEQ ID | 20 | downstream |
| 1634 | | NO: 2441) | | |
| CEP290- | − | UGGAAUAUAAGUCUUUUGAUAU (SEQ | 22 | downstream |
| 1635 | | ID NO: 2442) | | |
| CEP290- | − | UGUGAAGAAUGGAAUAGAUAAUA | 23 | downstream |
| 1636 | | (SEQ ID NO: 2443) | | |
| CEP290- | − | UGAAGAAUGGAAUAGAUAAUA (SEQ | 21 | downstream |
| 1637 | | ID NO: 2444) | | |
| CEP290- | − | UGGAUGGGUAAUAAAGCAA (SEQ ID | 19 | downstream |
| 1638 | | NO: 2445) | | |
| CEP290- | + | UAGAAAUUCACUGAGCAAAACAA (SEQ | 23 | downstream |
| 1639 | | ID NO: 2446) | | |
| CEP290- | + | UGUAAGACUGGAGAUAGAGA (SEQ ID | 20 | downstream |
| 1640 | | NO: 898) | | |
| CEP290- | + | UAAGACUGGAGAUAGAGA (SEQ ID NO: | 18 | downstream |
| 1641 | | 2448) | | |
| CEP290- | − | UUGAAAUUUGAUAGUAGAAGAAAA | 24 | downstream |
| 1642 | | (SEQ ID NO: 2449) | | |
| CEP290- | − | UGAAAUUUGAUAGUAGAAGAAAA | 23 | downstream |
| 1643 | | (SEQ ID NO: 2450) | | |
| CEP290- | − | UUUGAUAGUAGAAGAAAA (SEQ ID NO: | 18 | downstream |
| 1644 | | 2451) | | |
| CEP290- | + | UAAAACUAAGACACUGCCAA (SEQ ID | 20 | downstream |
| 1645 | | NO: 871) | | |
| CEP290- | − | UUUUUCUUAAGCAUACUUUUUUUA | 24 | downstream |
| 1646 | | (SEQ ID NO: 2453) | | |
| CEP290- | − | UUUUCUUAAGCAUACUUUUUUUA | 23 | downstream |
| 1647 | | (SEQ ID NO: 2454) | | |
| CEP290- | − | UUUCUUAAGCAUACUUUUUUUA (SEQ | 22 | downstream |
| 1648 | | ID NO: 2455) | | |
| CEP290- | − | UUCUUAAGCAUACUUUUUUUA (SEQ ID | 21 | downstream |
| 1649 | | NO: 2456) | | |
| CEP290- | − | UCUUAAGCAUACUUUUUUUA (SEQ ID | 20 | downstream |
| 1650 | | NO: 891) | | |
| CEP290- | − | UUAAGCAUACUUUUUUUA (SEQ ID NO: | 18 | downstream |
| 1651 | | 2458) | | |
| CEP290- | − | UGGGUAAUAAAGCAAAAGAAAAAC | 24 | downstream |
| 1652 | | (SEQ ID NO: 2459) | | |
| CEP290- | − | UAAUAAAGCAAAAGAAAAAC (SEQ ID | 20 | downstream |
| 1653 | | NO: 2460) | | |
| CEP290- | − | UUCUUUUUUUGUUGUUUUUUUUU | 23 | downstream |
| 1654 | | (SEQ ID NO: 2461) | | |
| CEP290- | − | UCUUUUUUUGUUGUUUUUUUUU (SEQ | 22 | downstream |
| 1655 | | ID NO: 2462) | | |
| CEP290- | − | UUUUUUUGUUGUUUUUUUUU (SEQ ID | 20 | downstream |
| 1656 | | NO: 2463) | | |
| CEP290- | − | UUUUUUGUUGUUUUUUUUU (SEQ ID | 19 | downstream |
| 1657 | | NO: 2464) | | |
| CEP290- | − | UUUUUGUUGUUUUUUUUU (SEQ ID NO: | 18 | downstream |
| 1658 | | 2465) | | |
| CEP290- | + | UGCACUCCAGCCUGGGCAACACA (SEQ | 23 | downstream |
| 1659 | | ID NO: 2466) | | |
| CEP290- | + | UCCAGCCUGGGCAACACA (SEQ ID NO: | 18 | downstream |
| 1660 | | 2467) | | |
| CEP290- | + | AUUUUCGUGACCUCUAGUCUC (SEQ ID | 21 | downstream |
| 1661 | | NO: 2468) | | |
| CEP290- | + | ACUAAUCACUCUCAUGUAUUAGC (SEQ | 23 | downstream |
| 1662 | | ID NO: 2469) | | |
| CEP290- | + | AAUCACUCUCAUGUAUUAGC (SEQ ID | 20 | downstream |
| 1663 | | NO: 814) | | |
| CEP290- | + | AUCACUCUCAUGUAUUAGC (SEQ ID | 19 | downstream |
| 1664 | | NO: 2471) | | |
| CEP290- | + | AGAUGACAUGAGGUAAGUA (SEQ ID | 19 | downstream |
| 1665 | | NO: 2472) | | |
| CEP290- | − | ACCUCAUGUCAUCUAGAGCAAGAG | 24 | downstream |
| 1666 | | (SEQ ID NO: 2473) | | |
| CEP290- | − | AUGUCAUCUAGAGCAAGAG (SEQ ID | 19 | downstream |
| 1667 | | NO: 2474) | | |
| CEP290- | − | AAUACAUGAGAGUGAUUAGUGGUG | 24 | downstream |
| 1668 | | (SEQ ID NO: 2475) | | |
| CEP290- | − | AUACAUGAGAGUGAUUAGUGGUG | 23 | downstream |
| 1669 | | (SEQ ID NO: 2476) | | |
| CEP290- | − | ACAUGAGAGUGAUUAGUGGUG (SEQ | 21 | downstream |
| 1670 | | ID NO: 2477) | | |
| CEP290- | − | AUGAGAGUGAUUAGUGGUG (SEQ ID | 19 | downstream |
| 1671 | | NO: 2478) | | |
| CEP290- | − | ACGUGCUCUUUUCUAUAUAUA (SEQ ID | 21 | downstream |
| 1672 | | NO: 2479) | | |
| CEP290- | + | ACAAAACCUAUGUAUAAGAUG (SEQ ID | 21 | downstream |
| 1673 | | NO: 2480) | | |
| CEP290- | + | AAAACCUAUGUAUAAGAUG (SEQ ID | 19 | downstream |
| 1674 | | NO: 2481) | | |
| CEP290- | + | AAACCUAUGUAUAAGAUG (SEQ ID NO: | 18 | downstream |
| 1675 | | 2482) | | |
| CEP290- | + | AUAUAUAGAAAAGAGCACGUACAA | 24 | downstream |
| 1676 | | (SEQ ID NO: 2483) | | |
| CEP290- | + | AUAUAGAAAAGAGCACGUACAA (SEQ | 22 | downstream |
| 1677 | | ID NO: 2484) | | |
| CEP290- | + | AUAGAAAAGAGCACGUACAA (SEQ ID | 20 | downstream |
| 1678 | | NO: 832) | | |
| CEP290- | + | AGAAAAGAGCACGUACAA (SEQ ID NO: | 18 | downstream |
| 1679 | | 2486) | | |
| CEP290- | + | AGAAAUGGUUCCCUAUAUAUAGAA | 24 | downstream |
| 1680 | | (SEQ ID NO: 2487) | | |
| CEP290- | + | AAAUGGUUCCCUAUAUAUAGAA (SEQ | 22 | downstream |
| 1681 | | ID NO: 2488) | | |
| CEP290- | + | AAUGGUUCCCUAUAUAUAGAA (SEQ ID | 21 | downstream |
| 1682 | | NO: 2489) | | |
| CEP290- | + | AUGGUUCCCUAUAUAUAGAA (SEQ ID | 20 | downstream |
| 1683 | | NO: 839) | | |
| CEP290- | − | AUGGAAUAUAAGUCUUUUGAUAUA | 24 | downstream |
| 1684 | | (SEQ ID NO: 2491) | | |
| CEP290- | − | AAUAUAAGUCUUUUGAUAUA (SEQ ID | 20 | downstream |
| 1685 | | NO: 687) | | |
| CEP290- | − | AUAUAAGUCUUUUGAUAUA (SEQ ID | 19 | downstream |
| 1686 | | NO: 2493) | | |
| CEP290- | + | ACGUACAAAAGAACAUACAUAAGA | 24 | downstream |
| 1687 | | (SEQ ID NO: 2494) | | |
| CEP290- | + | ACAAAAGAACAUACAUAAGA (SEQ ID | 20 | downstream |
| 1688 | | NO: 816) | | |
| CEP290- | + | AAAAGAACAUACAUAAGA (SEQ ID NO: | 18 | downstream |
| 1689 | | 2496) | | |
| CEP290- | + | AAGAAAAAAAAGGUAAUGC (SEQ ID | 19 | downstream |
| 1690 | | NO: 2497) | | |
| CEP290- | + | AGAAAAAAAAGGUAAUGC (SEQ ID NO: | 18 | downstream |
| 1691 | | 2498) | | |
| CEP290- | + | AAACAGGAAUAGAAAUUCA (SEQ ID | 19 | downstream |
| 1692 | | NO: 2499) | | |
| CEP290- | + | AACAGGAAUAGAAAUUCA (SEQ ID NO: | 18 | downstream |
| 1693 | | 2500) | | |
| CEP290- | + | AAGAUCACUCCACUGCACUCCAGC | 24 | downstream |
| 1694 | | (SEQ ID NO: 2501) | | |
| CEP290- | + | AGAUCACUCCACUGCACUCCAGC (SEQ | 23 | downstream |
| 1695 | | ID NO: 2502) | | |
| CEP290- | + | AUCACUCCACUGCACUCCAGC (SEQ ID | 21 | downstream |
| 1696 | | NO: 2503) | | |
| CEP290- | + | ACUCCACUGCACUCCAGC (SEQ ID NO: | 18 | downstream |
| 1697 | | 2504) | | |
| CEP290- | − | CCCCUACUUACCUCAUGUCAUC (SEQ | 22 | downstream |
| 1698 | | ID NO: 2505) | | |
| CEP290- | − | CCCUACUUACCUCAUGUCAUC (SEQ ID | 21 | downstream |
| 1699 | | NO: 2506) | | |
| CEP290- | − | CCUACUUACCUCAUGUCAUC (SEQ ID | 20 | downstream |
| 1700 | | NO: 747) | | |
| CEP290- | − | CUACUUACCUCAUGUCAUC (SEQ ID | 19 | downstream |
| 1701 | | NO: 2508) | | |
| CEP290- | + | CUGAUUUUCGUGACCUCUAGUCUC | 24 | downstream |
| 1702 | | (SEQ ID NO: 2509) | | |
| CEP290- | + | CACUAAUCACUCUCAUGUAUUAGC | 24 | downstream |
| 1703 | | (SEQ ID NO: 2510) | | |
| CEP290- | + | CUAAUCACUCUCAUGUAUUAGC (SEQ | 22 | downstream |
| 1704 | | ID NO: 2511) | | |
| CEP290- | + | CUCUAGAUGACAUGAGGUAAGUA | 23 | downstream |
| 1705 | | (SEQ ID NO: 2512) | | |
| CEP290- | + | CUAGAUGACAUGAGGUAAGUA (SEQ ID | 21 | downstream |
| 1706 | | NO: 2513) | | |
| CEP290- | − | CCUCAUGUCAUCUAGAGCAAGAG (SEQ | 23 | downstream |
| 1707 | | ID NO: 2514) | | |
| CEP290- | − | CUCAUGUCAUCUAGAGCAAGAG (SEQ | 22 | downstream |
| 1708 | | ID NO: 2515) | | |
| CEP290- | − | CAUGUCACUAGAGCAAGAG (SEQ ID | 20 | downstream |
| 1709 | | NO: 855) | | |
| CEP290- | − | CAUGAGAGUGAUUAGUGGUG (SEQ ID | 20 | downstream |
| 1710 | | NO: 854) | | |
| CEP290- | − | CGUGCUCUUUUCUAUAUAUA (SEQ ID | 20 | downstream |
| 1711 | | NO: 624) | | |
| CEP290- | + | CAAAACCUAUGUAUAAGAUG (SEQ ID | 20 | downstream |
| 1712 | | NO: 841) | | |
| CEP290- | + | CGUACAAAAGAACAUACAUAAGA (SEQ | 23 | downstream |
| 1713 | | ID NO: 2520) | | |
| CEP290- | + | CAAAAGAACAUACAUAAGA (SEQ ID | 19 | downstream |
| 1714 | | NO: 2521) | | |
| CEP290- | + | CUUAAGAAAAAAAAGGUAAUGC (SEQ | 22 | downstream |
| 1715 | | ID NO: 2522) | | |
| CEP290- | − | CUUAAGCAUACUUUUUUUAA (SEQ ID | 20 | downstream |
| 1716 | | NO: 690) | | |
| CEP290- | + | CACUCCACUGCACUCCAGC (SEQ ID | 19 | downstream |
| 1717 | | NO: 2524) | | |
| CEP290-132 | − | GUCCCCUACUUACCUCAUGUCAUC | 24 | downstream |
| | | (SEQ ID NO: 2525) | | |
| CEP290- | + | GAUUUUCGUGACCUCUAGUCUC (SEQ | 22 | downstream |
| 1718 | | ID NO: 2526) | | |
| CEP290- | + | GCUCUAGAUGACAUGAGGUAAGUA | 24 | downstream |
| 1719 | | (SEQ ID NO: 2527) | | |
| CEP290- | + | GAUGACAUGAGGUAAGUA (SEQ ID NO: | 18 | downstream |
| 1720 | | 2528) | | |
| CEP290- | − | GUACGUGCUCUUUUCUAUAUAUA (SEQ | 23 | downstream |
| 1721 | | ID NO: 2529) | | |
| CEP290- | − | GUGCUCUUUUCUAUAUAUA (SEQ ID | 19 | downstream |
| 1722 | | NO: 2530) | | |
| CEP290- | + | GUACAAAACCUAUGUAUAAGAUG | 23 | downstream |
| 1723 | | (SEQ ID NO: 2531) | | |
| CEP290- | + | GAAAUGGUUCCCUAUAUAUAGAA | 23 | downstream |
| 1724 | | (SEQ ID NO: 2532) | | |
| CEP290- | + | GGUUCCCUAUAUAUAGAA (SEQ ID NO: | 18 | downstream |
| 1725 | | 2533) | | |
| CEP290- | − | GGAAUAUAAGUCUUUUGAUAUA (SEQ | 22 | downstream |
| 1726 | | ID NO: 2534) | | |
| CEP290- | − | GAAUAUAAGUCUUUUGAUAUA (SEQ | 21 | downstream |
| 1727 | | ID NO: 2535) | | |
| CEP290- | + | GUACAAAAGAACAUACAUAAGA (SEQ | 22 | downstream |
| 1728 | | ID NO: 2536) | | |
| CEP290- | + | GCUUAAGAAAAAAAAGGUAAUGC | 23 | downstream |
| 1729 | | (SEQ ID NO: 2537) | | |
| CEP290- | + | GAAACAGGAAUAGAAAUUCA (SEQ ID | 20 | downstream |
| 1730 | | NO: 769) | | |
| CEP290- | + | GAUCACUCCACUGCACUCCAGC (SEQ | 22 | downstream |
| 1731 | | ID NO: 2539) | | |
| CEP290- | − | UCCCCUACUUACCUCAUGUCAUC (SEQ | 23 | downstream |
| 1732 | | ID NO: 2540) | | |
| CEP290- | − | UACUUACCUCAUGUCAUC (SEQ ID NO: | 18 | downstream |
| 1733 | | 2541) | | |
| CEP290- | + | UGAUUUUCGUGACCUCUAGUCUC (SEQ | 23 | downstream |
| 1734 | | ID NO: 2542) | | |
| CEP290- | + | UUUUCGUGACCUCUAGUCUC (SEQ ID | 20 | downstream |
| 1735 | | NO: 2543) | | |
| CEP290- | + | UUUCGUGACCUCUAGUCUC (SEQ ID | 19 | downstream |
| 1736 | | NO: 2544) | | |
| CEP290- | + | UUCGUGACCUCUAGUCUC (SEQ ID NO: | 18 | downstream |
| 1737 | | 2545) | | |
| CEP290- | + | UAAUCACUCUCAUGUAUUAGC (SEQ ID | 21 | downstream |
| 1738 | | NO: 2546) | | |
| CEP290- | + | UCACUCUCAUGUAUUAGC (SEQ ID NO: | 18 | downstream |
| 1739 | | 2547) | | |
| CEP290- | + | UCUAGAUGACAUGAGGUAAGUA (SEQ | 22 | downstream |
| 1740 | | ID NO: 2548) | | |
| CEP290- | + | UAGAUGACAUGAGGUAAGUA (SEQ ID | 20 | downstream |
| 1741 | | NO: 680) | | |
| CEP290- | − | UCAUGUCAUCUAGAGCAAGAG (SEQ ID | 21 | downstream |
| 1742 | | NO: 2550) | | |
| CEP290- | − | UGUCAUCUAGAGCAAGAG (SEQ ID NO: | 18 | downstream |
| 1743 | | 2551) | | |
| CEP290- | − | UACAUGAGAGUGAUUAGUGGUG (SEQ | 22 | downstream |
| 1744 | | ID NO: 2552) | | |
| CEP290- | − | UGAGAGUGAUUAGUGGUG (SEQ ID NO: | 18 | downstream |
| 1745 | | 2553) | | |
| CEP290- | − | UGUACGUGCUCUUUUCUAUAUAUA | 24 | downstream |
| 1746 | | (SEQ ID NO: 2554) | | |
| CEP290- | − | UACGUGCUCUUUUCUAUAUAUA (SEQ | 22 | downstream |
| 1747 | | ID NO: 2555) | | |
| CEP290- | − | UGCUCUUUUCUAUAUAUA (SEQ ID NO: | 18 | downstream |
| 1748 | | 2556) | | |
| CEP290- | + | UGUACAAAACCUAUGUAUAAGAUG | 24 | downstream |
| 1749 | | (SEQ ID NO: 2557) | | |
| CEP290- | + | UACAAAACCUAUGUAUAAGAUG (SEQ | 22 | downstream |
| 1750 | | ID NO: 2558) | | |
| CEP290- | + | UAUAUAGAAAAGAGCACGUACAA | 23 | downstream |
| 1751 | | (SEQ ID NO: 2559) | | |
| CEP290- | + | UAUAGAAAAGAGCACGUACAA (SEQ ID | 21 | downstream |
| 1752 | | NO: 2560) | | |
| CEP290- | + | UAGAAAAGAGCACGUACAA (SEQ ID | 19 | downstream |
| 1753 | | NO: 2561) | | |
| CEP290- | + | UGGUUCCCUAUAUAUAGAA (SEQ ID | 19 | downstream |
| 1754 | | NO: 2562) | | |
| CEP290- | − | UGGAAUAUAAGUCUUUUGAUAUA | 23 | downstream |
| 1755 | | (SEQ ID NO: 2563) | | |
| CEP290- | − | UAUAAGUCUUUUGAUAUA (SEQ ID NO: | 18 | downstream |
| 1756 | | 2564) | | |
| CEP290- | + | UACAAAAGAACAUACAUAAGA (SEQ ID | 21 | downstream |
| 1757 | | NO: 2565) | | |
| CEP290- | + | UGCUUAAGAAAAAAAAGGUAAUGC | 24 | downstream |
| 1758 | | (SEQ ID NO: 2566) | | |
| CEP290- | + | UUAAGAAAAAAAAGGUAAUGC (SEQ | 21 | downstream |
| 1759 | | ID NO: 2567) | | |
| CEP290- | + | UAAGAAAAAAAAGGUAAUGC (SEQ ID | 20 | downstream |
| 1760 | | NO: 872) | | |
| CEP290- | + | UUUUGAAACAGGAAUAGAAAUUCA | 24 | downstream |
| 1761 | | (SEQ ID NO: 2569) | | |
| CEP290- | + | UUUGAAACAGGAAUAGAAAUUCA | 23 | downstream |
| 1762 | | (SEQ ID NO: 2570) | | |
| CEP290- | + | UUGAAACAGGAAUAGAAAUUCA (SEQ | 22 | downstream |
| 1763 | | ID NO: 2571) | | |
| CEP290- | + | UGAAACAGGAAUAGAAAUUCA (SEQ ID | 21 | downstream |
| 1764 | | NO: 2572) | | |
| CEP290- | − | UUUUCUUAAGCAUACUUUUUUUAA | 24 | downstream |
| 1765 | | (SEQ ID NO: 2573) | | |
| CEP290- | − | UUUCUUAAGCAUACUUUUUUUAA | 23 | downstream |
| 1766 | | (SEQ ID NO: 2574) | | |
| CEP290- | − | UUCUUAAGCAUACUUUUUUUAA (SEQ | 22 | downstream |
| 1767 | | ID NO: 2575) | | |
| CEP290- | − | UCUUAAGCAUACUUUUUUUAA (SEQ ID | 21 | downstream |
| 1768 | | NO: 2576) | | |
| CEP290- | − | UUAAGCAUACUUUUUUUAA (SEQ ID | 19 | downstream |
| 1769 | | NO: 2577) | | |
| CEP290- | − | UAAGCAUACUUUUUUUAA (SEQ ID NO: | 18 | downstream |
| 1770 | | 2578) | | |
| CEP290- | + | UCACUCCACUGCACUCCAGC (SEQ ID | 20 | downstream |
| 1771 | | NO: 2579) | | |
| CEP290- | + | AGUUUUUAAGGCGGGGAGUCACA | 23 | downstream |
| 1772 | | (SEQ ID NO: 2580) | | |
| CEP290- | − | AAACUGUCAAAAGCUACCGGUUAC | 24 | downstream |
| 1773 | | (SEQ ID NO: 2581) | | |
| CEP290- | − | AACUGUCAAAAGCUACCGGUUAC (SEQ | 23 | downstream |
| 1774 | | ID NO: 2582) | | |
| CEP290-252 | − | ACUGUCAAAAGCUACCGGUUAC (SEQ | 22 | downstream |
| | | ID NO: 2583) | | |
| CEP290- | + | AGUUCAUCUCUUGCUCUAGAUGAC | 24 | downstream |
| 1775 | | (SEQ ID NO: 2584) | | |
| CEP290- | + | AUCUCUUGCUCUAGAUGAC (SEQ ID | 19 | downstream |
| 1776 | | NO: 2585) | | |
| CEP290- | − | ACGAAAAUCAGAUUUCAUGU (SEQ ID | 20 | downstream |
| 1777 | | NO: 2586) | | |
| CEP290- | − | AAUACAUGAGAGUGAUUAGUG (SEQ | 21 | downstream |
| 1778 | | ID NO: 2587) | | |
| CEP290- | − | AUACAUGAGAGUGAUUAGUG (SEQ ID | 20 | downstream |
| 1779 | | NO: 831) | | |
| CEP290- | − | ACAUGAGAGUGAUUAGUG (SEQ ID NO: | 18 | downstream |
| 1780 | | 2589) | | |
| CEP290- | + | AUUAGCUUGAACUCUGUGCCAAA (SEQ | 23 | downstream |
| 1781 | | ID NO: 2590) | | |
| CEP290- | + | AGCUUGAACUCUGUGCCAAA (SEQ ID | 20 | downstream |
| 1782 | | NO: 824) | | |
| CEP290- | − | AUGUAGAUUGAGGUAGAAUCAAG | 23 | downstream |
| 1783 | | (SEQ ID NO: 2592) | | |
| CEP290- | − | AGAUUGAGGUAGAAUCAAG (SEQ ID | 19 | downstream |
| 1784 | | NO: 2593) | | |
| CEP290- | + | AUAAGAUGCAGAACUAGUGUAGA | 23 | downstream |
| 1785 | | (SEQ ID NO: 2594) | | |
| CEP290- | + | AAGAUGCAGAACUAGUGUAGA (SEQ ID | 21 | downstream |
| 1786 | | NO: 2595) | | |
| CEP290- | + | AGAUGCAGAACUAGUGUAGA (SEQ ID | 20 | downstream |
| 1787 | | NO: 821) | | |
| CEP290- | + | AUGCAGAACUAGUGUAGA (SEQ ID NO: | 18 | downstream |
| 1788 | | 2597) | | |
| CEP290- | − | AUAGAUGUAGAUUGAGGUAGAAUC | 24 | downstream |
| 1789 | | (SEQ ID NO: 2598) | | |
| CEP290- | − | AGAUGUAGAUUGAGGUAGAAUC (SEQ | 22 | downstream |
| 1790 | | ID NO: 2599) | | |
| CEP290- | − | AUGUAGAUUGAGGUAGAAUC (SEQ ID | 20 | downstream |
| 1791 | | NO: 2600) | | |
| CEP290- | + | AGAAUGAUCAUUCUUGUGGCAGUA | 24 | downstream |
| 1792 | | (SEQ ID NO: 2601) | | |
| CEP290- | + | AAUGAUCAUUCUUGUGGCAGUA (SEQ | 22 | downstream |
| 1793 | | ID NO: 2602) | | |
| CEP290- | + | AUGAUCAUUCUUGUGGCAGUA (SEQ ID | 21 | downstream |
| 1794 | | NO: 2603) | | |
| CEP290- | + | AUCAUUCUUGUGGCAGUA (SEQ ID NO: | 18 | downstream |
| 1795 | | 2604) | | |
| CEP290- | + | AGAAUGAUCAUUCUUGUGGCAGU | 23 | downstream |
| 1796 | | (SEQ ID NO: 2605) | | |
| CEP290- | + | AAUGAUCAUUCUUGUGGCAGU (SEQ ID | 21 | downstream |
| 1797 | | NO: 2606) | | |
| CEP290- | + | AUGAUCAUUCUUGUGGCAGU (SEQ ID | 20 | downstream |
| 1798 | | NO: 837) | | |
| CEP290- | − | AGAGGUAAAGGUUCAUGAGAC (SEQ ID | 21 | downstream |
| 1799 | | NO: 2608) | | |
| CEP290- | − | AGGUAAAGGUUCAUGAGAC (SEQ ID | 19 | downstream |
| 1800 | | NO: 2609) | | |
| CEP290- | + | AGCUUUUGACAGUUUUUAAG (SEQ ID | 20 | downstream |
| 1801 | | NO: 825) | | |
| CEP290- | + | AGCUUUUGACAGUUUUUAAGGC (SEQ | 22 | downstream |
| 1802 | | ID NO: 2611) | | |
| CEP290- | + | AGAAAUUCACUGAGCAAAACAAC (SEQ | 23 | downstream |
| 1803 | | ID NO: 2612) | | |
| CEP290- | + | AAAUUCACUGAGCAAAACAAC (SEQ ID | 21 | downstream |
| 1804 | | NO: 2613) | | |
| CEP290- | + | AAUUCACUGAGCAAAACAAC (SEQ ID | 20 | downstream |
| 1805 | | NO: 678) | | |
| CEP290- | + | AUUCACUGAGCAAAACAAC (SEQ ID | 19 | downstream |
| 1806 | | NO: 2615) | | |
| CEP290- | + | AGUAAGGAGGAUGUAAGA (SEQ ID NO: | 18 | downstream |
| 1807 | | 2616) | | |
| CEP290- | + | AUCAAAAGACUUAUAUUCCAUUA (SEQ | 23 | downstream |
| 1808 | | ID NO: 2617) | | |
| CEP290- | + | AAAAGACUUAUAUUCCAUUA (SEQ ID | 20 | downstream |
| 1809 | | NO: 685) | | |
| CEP290- | + | AAAGACUUAUAUUCCAUUA (SEQ ID | 19 | downstream |
| 1810 | | NO: 2619) | | |
| CEP290- | + | AAGACUUAUAUUCCAUUA (SEQ ID NO: | 18 | downstream |
| 1811 | | 2620) | | |
| CEP290- | − | AGGAAAUUAUUGUUGCUUUUU (SEQ | 21 | downstream |
| 1812 | | ID NO: 2621) | | |
| CEP290- | − | AAAUUAUUGUUGCUUUUU (SEQ ID NO: | 18 | downstream |
| 1813 | | 2622) | | |
| CEP290- | − | AAAGAAAAACUUGAAAUUUGAUAG | 24 | downstream |
| 1814 | | (SEQ ID NO: 2623) | | |
| CEP290- | − | AAGAAAAACUUGAAAUUUGAUAG | 23 | downstream |
| 1815 | | (SEQ ID NO: 2624) | | |
| CEP290- | − | AGAAAAACUUGAAAUUUGAUAG (SEQ | 22 | downstream |
| 1816 | | ID NO: 2625) | | |
| CEP290- | − | AAAAACUUGAAAUUUGAUAG (SEQ ID | 20 | downstream |
| 1817 | | NO: 2626) | | |
| CEP290- | − | AAAACUUGAAAUUUGAUAG (SEQ ID | 19 | downstream |
| 1818 | | NO: 2627) | | |
| CEP290- | − | AAACUUGAAAUUUGAUAG (SEQ ID NO: | 18 | downstream |
| 1819 | | 2628) | | |
| CEP290- | − | AAGAAAAAAGAAAUAGAUGUAGA | 23 | downstream |
| 1820 | | (SEQ ID NO: 2629) | | |
| CEP290- | − | AGAAAAAAGAAAUAGAUGUAGA (SEQ | 22 | downstream |
| 1821 | | ID NO: 2630) | | |
| CEP290- | − | AAAAAAGAAAUAGAUGUAGA (SEQ ID | 20 | downstream |
| 1822 | | NO: 2631) | | |
| CEP290- | − | AAAAAGAAAUAGAUGUAGA (SEQ ID | 19 | downstream |
| 1823 | | NO: 2632) | | |
| CEP290- | − | AAAAGAAAUAGAUGUAGA (SEQ ID NO: | 18 | downstream |
| 1824 | | 2633) | | |
| CEP290- | − | AGAGUCUCACUGUGUUGCCCAGG (SEQ | 23 | downstream |
| 1825 | | ID NO: 2634) | | |
| CEP290- | − | AGUCUCACUGUGUUGCCCAGG (SEQ ID | 21 | downstream |
| 1826 | | NO: 2635) | | |
| CEP290- | + | CAGUUUUUAAGGCGGGGAGUCACA | 24 | downstream |
| 1827 | | (SEQ ID NO: 2636) | | |
| CEP290- | − | CUGUCAAAAGCUACCGGUUAC (SEQ ID | 21 | downstream |
| 1828 | | NO: 2637) | | |
| CEP290- | + | CAUCUCUUGCUCUAGAUGAC (SEQ ID | 20 | downstream |
| 1829 | | NO: 853) | | |
| CEP290- | − | CACGAAAAUCAGAUUUCAUGU (SEQ ID | 21 | downstream |
| 1830 | | NO: 2639) | | |
| CEP290- | − | CGAAAAUCAGAUUUCAUGU (SEQ ID | 19 | downstream |
| 1831 | | NO: 2640) | | |
| CEP290- | − | CUAAUACAUGAGAGUGAUUAGUG | 23 | downstream |
| 1832 | | (SEQ ID NO: 2641) | | |
| CEP290- | + | CUUGAACUCUGUGCCAAA (SEQ ID NO: | 18 | downstream |
| 1833 | | 2642) | | |
| CEP290- | + | CUCUAGAUGACAUGAGGUAAG (SEQ ID | 21 | downstream |
| 1834 | | NO: 2643) | | |
| CEP290- | + | CUAGAUGACAUGAGGUAAG (SEQ ID | 19 | downstream |
| 1835 | | NO: 2644) | | |
| CEP290- | + | CGGUAGCUUUUGACAGUUUUUAAG | 24 | downstream |
| 1836 | | (SEQ ID NO: 2645) | | |
| CEP290- | + | CUUUUGACAGUUUUUAAG (SEQ ID NO: | 18 | downstream |
| 1837 | | 2646) | | |
| CEP290- | + | CUUUUGACAGUUUUUAAGGC (SEQ ID | 20 | downstream |
| 1838 | | NO: 684) | | |
| CEP290- | + | CAGUAAGGAGGAUGUAAGA (SEQ ID | 19 | downstream |
| 1839 | | NO: 2648) | | |
| CEP290- | + | CAAAAGACUUAUAUUCCAUUA (SEQ ID | 21 | downstream |
| 1840 | | NO: 2649) | | |
| CEP290- | − | CUUAGGAAAUUAUUGUUGCUUUUU | 24 | downstream |
| 1841 | | (SEQ ID NO: 2650) | | |
| CEP290- | − | CUGUGUUGCCCAGGCUGGAGUGCA | 24 | downstream |
| 1842 | | (SEQ ID NO: 2651) | | |
| CEP290- | − | CAGAGUCUCACUGUGUUGCCCAGG | 24 | downstream |
| 1843 | | (SEQ ID NO: 2652) | | |
| CEP290- | − | CUCACUGUGUUGCCCAGG (SEQ ID NO: | 18 | downstream |
| 1844 | | 2653) | | |
| CEP290- | + | GUUUUUAAGGCGGGGAGUCACA (SEQ | 22 | downstream |
| 1845 | | ID NO: 2654) | | |
| CEP290- | − | GUCAAAAGCUACCGGUUAC (SEQ ID | 19 | downstream |
| 1846 | | NO: 2655) | | |
| CEP290- | + | GUUCAUCUCUUGCUCUAGAUGAC (SEQ | 23 | downstream |
| 1847 | | ID NO: 2656) | | |
| CEP290- | − | GGUCACGAAAAUCAGAUUUCAUGU | 24 | downstream |
| 1848 | | (SEQ ID NO: 2657) | | |
| CEP290- | − | GUCACGAAAAUCAGAUUUCAUGU (SEQ | 23 | downstream |
| 1849 | | ID NO: 2658) | | |
| CEP290- | − | GAAAAUCAGAUUUCAUGU (SEQ ID NO: | 18 | downstream |
| 1850 | | 2659) | | |
| CEP290- | − | GCUAAUACAUGAGAGUGAUUAGUG | 24 | downstream |
| 1851 | | (SEQ ID NO: 2660) | | |
| CEP290- | + | GCUUGAACUCUGUGCCAAA (SEQ ID | 19 | downstream |
| 1852 | | NO: 2661) | | |
| CEP290- | + | GCUCUAGAUGACAUGAGGUAAG (SEQ | 22 | downstream |
| 1853 | | ID NO: 2662) | | |
| CEP290- | − | GAUGUAGAUUGAGGUAGAAUCAAG | 24 | downstream |
| 1854 | | (SEQ ID NO: 2663) | | |
| CEP290- | − | GUAGAUUGAGGUAGAAUCAAG (SEQ | 21 | downstream |
| 1855 | | ID NO: 2664) | | |
| CEP290- | − | GAUUGAGGUAGAAUCAAG (SEQ ID NO: | 18 | downstream |
| 1856 | | 2665) | | |
| CEP290- | + | GAUGCAGAACUAGUGUAGA (SEQ ID | 19 | downstream |
| 1857 | | NO: 2666) | | |
| CEP290- | − | GAUGUAGAUUGAGGUAGAAUC (SEQ | 21 | downstream |
| 1858 | | ID NO: 2667) | | |
| CEP290- | − | GUAGAUUGAGGUAGAAUC (SEQ ID NO: | 18 | downstream |
| 1859 | | 2668) | | |
| CEP290- | + | GAAUGAUCAUUCUUGUGGCAGUA | 23 | downstream |
| 1860 | | (SEQ ID NO: 2669) | | |
| CEP290- | + | GAUCAUUCUUGUGGCAGUA (SEQ ID | 19 | downstream |
| 1861 | | NO: 2670) | | |
| CEP290- | + | GAAUGAUCAUUCUUGUGGCAGU (SEQ | 22 | downstream |
| 1862 | | ID NO: 2671) | | |
| CEP290- | + | GAUCAUUCUUGUGGCAGU (SEQ ID NO: | 18 | downstream |
| 1863 | | 2672) | | |
| CEP290- | − | GAGAGGUAAAGGUUCAUGAGAC (SEQ | 22 | downstream |
| 1864 | | ID NO: 2673) | | |
| CEP290- | − | GAGGUAAAGGUUCAUGAGAC (SEQ ID | 20 | downstream |
| 1865 | | NO: 2674) | | |
| CEP290- | − | GGUAAAGGUUCAUGAGAC (SEQ ID NO: | 18 | downstream |
| 1866 | | 2675) | | |
| CEP290- | + | GGUAGCUUUUGACAGUUUUUAAG | 23 | downstream |
| 1867 | | (SEQ ID NO: 2676) | | |
| CEP290- | + | GUAGCUUUUGACAGUUUUUAAG (SEQ | 22 | downstream |
| 1868 | | ID NO: 2677) | | |
| CEP290- | + | GCUUUUGACAGUUUUUAAG (SEQ ID | 19 | downstream |
| 1869 | | NO: 2678) | | |
| CEP290- | + | GUAGCUUUUGACAGUUUUUAAGGC | 24 | downstream |
| 1870 | | (SEQ ID NO: 2679) | | |
| CEP290- | + | GCUUUUGACAGUUUUUAAGGC (SEQ ID | 21 | downstream |
| 1871 | | NO: 2680) | | |
| CEP290- | + | GAAAUUCACUGAGCAAAACAAC (SEQ | 22 | downstream |
| 1872 | | ID NO: 2681) | | |
| CEP290- | + | GUGGCAGUAAGGAGGAUGUAAGA | 23 | downstream |
| 1873 | | (SEQ ID NO: 2682) | | |
| CEP290- | + | GGCAGUAAGGAGGAUGUAAGA (SEQ | 21 | downstream |
| 1874 | | ID NO: 2683) | | |
| CEP290- | + | GCAGUAAGGAGGAUGUAAGA (SEQ ID | 20 | downstream |
| 1875 | | NO: 775) | | |
| CEP290- | − | GGAAAUUAUUGUUGCUUUUU (SEQ ID | 20 | downstream |
| 1876 | | NO: 2685) | | |
| CEP290- | − | GAAAUUAUUGUUGCUUUUU (SEQ ID | 19 | downstream |
| 1877 | | NO: 2686) | | |
| CEP290- | − | GAAAAACUUGAAAUUUGAUAG (SEQ | 21 | downstream |
| 1878 | | ID NO: 2687) | | |
| CEP290- | − | GAAGAAAAAAGAAAUAGAUGUAGA | 24 | downstream |
| 1879 | | (SEQ ID NO: 2688) | | |
| CEP290- | − | GAAAAAAGAAAUAGAUGUAGA (SEQ | 21 | downstream |
| 1880 | | ID NO: 2689) | | |
| CEP290- | − | GUGUUGCCCAGGCUGGAGUGCA (SEQ | 22 | downstream |
| 1881 | | ID NO: 2690) | | |
| CEP290- | − | GUUGCCCAGGCUGGAGUGCA (SEQ ID | 20 | downstream |
| 1882 | | NO: 2691) | | |
| CEP290- | − | GAGUCUCACUGUGUUGCCCAGG (SEQ | 22 | downstream |
| 1883 | | ID NO: 2692) | | |
| CEP290- | − | GUCUCACUGUGUUGCCCAGG (SEQ ID | 20 | downstream |
| 1884 | | NO: 2693) | | |
| CEP290- | + | UUUUUAAGGCGGGGAGUCACA (SEQ ID | 21 | downstream |
| 1885 | | NO: 2694) | | |
| CEP290- | + | UUUUAAGGCGGGGAGUCACA (SEQ ID | 20 | downstream |
| 1886 | | NO: 672) | | |
| CEP290- | + | UUUAAGGCGGGGAGUCACA (SEQ ID | 19 | downstream |
| 1887 | | NO: 2696) | | |
| CEP290- | + | UUAAGGCGGGGAGUCACA (SEQ ID NO: | 18 | downstream |
| 1888 | | 2697) | | |
| CEP290- | − | UGUCAAAAGCUACCGGUUAC (SEQ ID | 20 | downstream |
| 1889 | | NO: 757) | | |
| CEP290- | − | UCAAAAGCUACCGGUUAC (SEQ ID NO: | 18 | downstream |
| 1890 | | 2699) | | |
| CEP290- | + | UUCAUCUCUUGCUCUAGAUGAC (SEQ | 22 | downstream |
| 1891 | | ID NO: 2700) | | |
| CEP290- | + | UCAUCUCUUGCUCUAGAUGAC (SEQ ID | 21 | downstream |
| 1892 | | NO: 2701) | | |
| CEP290- | + | UCUCUUGCUCUAGAUGAC (SEQ ID NO: | 18 | downstream |
| 1893 | | 2702) | | |
| CEP290- | − | UCACGAAAAUCAGAUUUCAUGU (SEQ | 22 | downstream |
| 1894 | | ID NO: 2703) | | |
| CEP290- | − | UAAUACAUGAGAGUGAUUAGUG (SEQ | 22 | downstream |
| 1895 | | ID NO: 2704) | | |
| CEP290- | − | UACAUGAGAGUGAUUAGUG (SEQ ID | 19 | downstream |
| 1896 | | NO: 2705) | | |
| CEP290- | + | UAUUAGCUUGAACUCUGUGCCAAA | 24 | downstream |
| 1897 | | (SEQ ID NO: 2706) | | |
| CEP290- | + | UUAGCUUGAACUCUGUGCCAAA (SEQ | 22 | downstream |
| 1898 | | ID NO: 2707) | | |
| CEP290- | + | UAGCUUGAACUCUGUGCCAAA (SEQ ID | 21 | downstream |
| 1899 | | NO: 2708) | | |
| CEP290- | + | UUGCUCUAGAUGACAUGAGGUAAG | 24 | downstream |
| 1900 | | (SEQ ID NO: 2709) | | |
| CEP290- | + | UGCUCUAGAUGACAUGAGGUAAG | 23 | downstream |
| 1901 | | (SEQ ID NO: 2710) | | |
| CEP290- | + | UCUAGAUGACAUGAGGUAAG (SEQ ID | 20 | downstream |
| 1902 | | NO: 888) | | |
| CEP290- | + | UAGAUGACAUGAGGUAAG (SEQ ID NO: | 18 | downstream |
| 1903 | | 2712) | | |
| CEP290- | − | UGUAGAUUGAGGUAGAAUCAAG (SEQ | 22 | downstream |
| 1904 | | ID NO: 2713) | | |
| CEP290- | − | UAGAUUGAGGUAGAAUCAAG (SEQ ID | 20 | downstream |
| 1905 | | NO: 2714) | | |
| CEP290- | + | UAUAAGAUGCAGAACUAGUGUAGA | 24 | downstream |
| 1906 | | (SEQ ID NO: 2715) | | |
| CEP290- | + | UAAGAUGCAGAACUAGUGUAGA (SEQ | 22 | downstream |
| 1907 | | ID NO: 2716) | | |
| CEP290- | − | UAGAUGUAGAUUGAGGUAGAAUC | 23 | downstream |
| 1908 | | (SEQ ID NO: 2717) | | |
| CEP290- | − | UGUAGAUUGAGGUAGAAUC (SEQ ID | 19 | downstream |
| 1909 | | NO: 2718) | | |
| CEP290- | + | UGAUCAUUCUUGUGGCAGUA (SEQ ID | 20 | downstream |
| 1910 | | NO: 688) | | |
| CEP290- | + | UAGAAUGAUCAUUCUUGUGGCAGU | 24 | downstream |
| 1911 | | (SEQ ID NO: 2720) | | |
| CEP290- | + | UGAUCAUUCUUGUGGCAGU (SEQ ID | 19 | downstream |
| 1912 | | NO: 2721) | | |
| CEP290- | − | UUGAGAGGUAAAGGUUCAUGAGAC | 24 | downstream |
| 1913 | | (SEQ ID NO: 2722) | | |
| CEP290- | − | UGAGAGGUAAAGGUUCAUGAGAC | 23 | downstream |
| 1914 | | (SEQ ID NO: 2723) | | |
| CEP290- | + | UAGCUUUUGACAGUUUUUAAG (SEQ ID | 21 | downstream |
| 1915 | | NO: 2724) | | |
| CEP290- | + | UAGCUUUUGACAGUUUUUAAGGC | 23 | downstream |
| 1916 | | (SEQ ID NO: 2725) | | |
| CEP290- | + | UUUUGACAGUUUUUAAGGC (SEQ ID | 19 | downstream |
| 1917 | | NO: 2726) | | |
| CEP290- | + | UUUGACAGUUUUUAAGGC (SEQ ID NO: | 18 | downstream |
| 1918 | | 2727) | | |
| CEP290- | + | UAGAAAUUCACUGAGCAAAACAAC | 24 | downstream |
| 1919 | | (SEQ ID NO: 2728) | | |
| CEP290- | + | UUCACUGAGCAAAACAAC (SEQ ID NO: | 18 | downstream |
| 1920 | | 2729) | | |
| CEP290- | + | UGUGGCAGUAAGGAGGAUGUAAGA | 24 | downstream |
| 1921 | | (SEQ ID NO: 2730) | | |
| CEP290- | + | UGGCAGUAAGGAGGAUGUAAGA (SEQ | 22 | downstream |
| 1922 | | ID NO: 2731) | | |
| CEP290- | + | UAUCAAAAGACUUAUAUUCCAUUA | 24 | downstream |
| 1923 | | (SEQ ID NO: 2732) | | |
| CEP290- | + | UCAAAAGACUUAUAUUCCAUUA (SEQ | 22 | downstream |
| 1924 | | ID NO: 2733) | | |
| CEP290- | − | UUAGGAAAUUAUUGUUGCUUUUU | 23 | downstream |
| 1925 | | (SEQ ID NO: 2734) | | |
| CEP290- | − | UAGGAAAUUAUUGUUGCUUUUU (SEQ | 22 | downstream |
| 1926 | | ID NO: 2735) | | |
| CEP290- | − | UGUGUUGCCCAGGCUGGAGUGCA (SEQ | 23 | downstream |
| 1927 | | ID NO: 2736) | | |
| CEP290- | − | UGUUGCCCAGGCUGGAGUGCA (SEQ ID | 21 | downstream |
| 1928 | | NO: 2737) | | |
| CEP290- | − | UUGCCCAGGCUGGAGUGCA (SEQ ID | 19 | downstream |
| 1929 | | NO: 2738) | | |
| CEP290- | − | UGCCCAGGCUGGAGUGCA (SEQ ID NO: | 18 | downstream |
| 1930 | | 2739) | | |
| CEP290- | − | UCUCACUGUGUUGCCCAGG (SEQ ID | 19 | downstream |
| 1931 | | NO: 2740) | | |
| CEP290-13 | + | AUGAGAUACUCACAAUUACAAC (SEQ | 22 | upstream |
| | | ID NO: 1049) | | |
| CEP290-18 | + | GUAUGAGAUACUCACAAUUACAAC | 24 | upstream |
| | | (SEQ ID NO: 1051) | | |
| CEP290-14 | + | UAUGAGAUACUCACAAUUACAAC (SEQ | 23 | upstream |
| | | ID NO: 1053) | | |
| CEP290-19 | + | GGUAUGAGAUAUUCACAAUUACAA | 24 | upstream |
| | | (SEQ ID NO: 1057) | | |

[0924] Table 10A provides targeting domains for break-induced deletion of genomic sequence including the mutation at the LCA10 target position in the CEP290 gene selected according to the first tier parameters. The targeting domains are within 1000 bp upstream of an Alu repeat, within 40 bp upstream of mutation, or 1000 bp downstream of the mutation, have good orthogonality, and start with G. It is contemplated herein that the targeting domain hybridizes to the target domain through complementary base pairing. Any of the targeting domains in the table can be used with a N. meningitidis Cas9 molecule that generates a double stranded break (Cas9 nuclease) or a single-stranded break (Cas9 nickase).

TABLE 10A

| | | | Target | Position |
|---|---|---|---|---|
| | DNA | Targeting | Site | relative to |
| gRNA Name | Strand | Domain | Length | mutation |
| CEP290-1932 | + | GGCAAAAGCAGCAG | 20 | upstream |
| | | AAAGCA (SEQ | | |
| | | ID NO: 591) | | |
| CEP290-1933 | − | GUGGCUGAAUGACU | 17 | upstream |
| | | UCU (SEQ | | |
| | | ID NO: 592) | | |
| CEP290-1934 | − | GUUGUUCUGAGUAG | 17 | upstream |
| | | CUU (SEQ | | |
| | | ID NO: 590) | | |
| CEP290-1935 | − | GACUAGAGGUCACG | 17 | downstream |
| | | AAA (SEQ | | |
| | | ID NO: 593) | | |
| CEP290-1936 | − | GAGUUCAAGCUAAU | 20 | downstream |
| | | ACAUGA (SEQ | | |
| | | ID NO: 589) | | |

[0925] Table 10B provides targeting domains for break-induced deletion of genomic sequence including the mutation at the LCA10 target position in the CEP290 gene selected according to the second tier parameters. The targeting domains are within 1000 bp upstream of an Alu repeat, within 40 bp upstream of mutation, or 1000 bp downstream of the mutation, have good orthogonality, and do not start with G. It is contemplated herein that the targeting domain hybridizes to the target domain through complementary base pairing. Any of the targeting domains in the table can be used with a N. meningitidis Cas9 molecule that generates a double stranded break (Cas9 nuclease) or a single-stranded break (Cas9 nickase).

TABLE 10B

| | | | Target | Position |
|---|---|---|---|---|
| | DNA | | Site | relative to |
| gRNA Name | Strand | Targeting Domain | Length | mutation |
| CEP290-1937 | + | AAAAGCAGCAGAAAGCA | 17 | upstream |
| | | (SEQ ID NO: 1012) | | |
| CEP290-1938 | − | AACGUUGUUCUGAGUAGCUU | 20 | upstream |
| | | (SEQ ID NO: 1014) | | |
| CEP290-1939 | − | AAUAGAGGCUUAUGGAU | 17 | upstream |
| | | (SEQ ID NO: 1007) | | |
| CEP290-1940 | + | ACUUAAUGAGUGCUUCCCUC | 20 | upstream |
| | | (SEQ ID NO: 2748) | | |
| CEP290-1941 | − | AGAAAUAGAGGCUUAUGGA | 20 | upstream |
| | | U (SEQ ID NO: 1016) | | |
| CEP290-1942 | + | AGCAGAAAGCAAACUGA | 17 | upstream |
| | | (SEQ ID NO: 1011) | | |
| CEP290-1943 | + | AGCAGCAGAAAGCAAACUGA | 20 | upstream |
| | | (SEQ ID NO: 1018) | | |
| CEP290-1944 | + | AGGGUCUGGUCCAUAUU | 17 | upstream |
| | | (SEQ ID NO: 2752) | | |
| CEP290-1945 | − | AUAGUGGCUGAAUGACUUCU | 20 | upstream |
| | | (SEQ ID NO: 2753) | | |
| CEP290-1946 | + | AUGUCUGGUUAAAAGAG | 17 | upstream |
| | | (SEQ ID NO: 2754) | | |
| CEP290-1947 | + | CAAAGGGUCUGGUCCAUAUU | 20 | upstream |
| | | (SEQ ID NO: 2755) | | |
| CEP290-1948 | − | CAUCAGAAAUAGAGGCU | 17 | upstream |
| | | (SEQ ID NO: 1009) | | |
| CEP290-1949 | − | CCUCAUCAGAAAUAGAGGCU | 20 | upstream |
| | | (SEQ ID NO: 1017) | | |
| CEP290-1950 | − | CUGAGGACAGAACAAGC | 17 | upstream |
| | | (SEQ ID NO: 1008) | | |
| CEP290-1951 | − | CUGCUGCUUUUGCCAAAGAG | 20 | upstream |
| | | (SEQ ID NO: 725) | | |
| CEP290-1952 | − | CUGCUUUUGCCAAAGAG | 17 | upstream |
| | | (SEQ ID NO: 711) | | |
| CEP290-1953 | + | UAAUGAGUGCUUCCCUC | 17 | upstream |
| | | (SEQ ID NO: 2761) | | |
| CEP290-1954 | + | UAGAUGUCUGGUUAAAAGA | 20 | upstream |
| | | G (SEQ ID NO: 2762) | | |
| CEP290-1955 | − | UCAUUCUCCUUAGGUCACUU | 20 | upstream |
| | | (SEQ ID NO: 2763) | | |
| CEP290-1956 | − | UUACUGAGGACAGAACAAGC | 20 | upstream |
| | | (SEQ ID NO: 1013) | | |
| CEP290-1957 | − | UUCUCCUUAGGUCACUU | 17 | upstream |
| | | (SEQ ID NO: 2765) | | |
| CEP290-1958 | − | AAGAAAAAAGAAAUAGA | 17 | downstream |
| | | (SEQ ID NO: 2766) | | |
| CEP290-1959 | − | AGAUUGAGGUAGAAUCAAG | 20 | downstream |
| | | A (SEQ ID NO: 2767) | | |
| CEP290-1960 | + | AGUCACAUGGGAGUCACAGG | 20 | downstream |
| | | (SEQ ID NO: 1006) | | |
| CEP290-1961 | + | CAAAAAAAGAAUCCUCU | 17 | downstream |
| | | (SEQ ID NO: 2769) | | |
| CEP290-1962 | + | CAACAAAAAAAGAAUCCUCU | 20 | downstream |
| | | (SEQ ID NO: 2770) | | |
| CEP290-1963 | + | CACAUGGGAGUCACAGG | 17 | downstream |
| | | (SEQ ID NO: 1005) | | |
| CEP290-1964 | + | CAUUCUUCACACAUGAA | 17 | downstream |
| | | (SEQ ID NO: 2772) | | |
| CEP290-1965 | − | UAGAAGAAAAAAGAAAUAG | 20 | downstream |
| | | A (SEQ ID NO: 2773) | | |
| CEP290-1966 | − | UGAGACUAGAGGUCACGAAA | 20 | downstream |
| | | (SEQ ID NO: 2774) | | |
| CEP290-1967 | − | UUCAAGCUAAUACAUGA | 17 | downstream |
| | | (SEQ ID NO: 1004) | | |
| CEP290-1968 | + | UUCCAUUCUUCACACAUGAA | 20 | downstream |
| | | (SEQ ID NO: 2776) | | |
| CEP290-1969 | − | UUGAGGUAGAAUCAAGA | 17 | downstream |
| | | (SEQ ID NO: 2777) | | |

[0926] Table 11 provides targeting domains for break-induced deletion of genomic sequence including the mutation at the LCA10 target position in the CEP290 gene by dual targeting (e.g., dual double strand cleavage). Exemplary gRNA pairs to be used with S. aureus Cas9 are shown in Table 11, e.g., CEP290-323 can be combined with CEP290-11, CEP290-323 can be combined with CEP290-64, CEP290-490 can be combined with CEP290-496, CEP290-490 can be combined with CEP290-502, CEP290-490 can be combined with CEP290-504, CEP290-492 can be combined with CEP290-502, or CEP290-492 can be combined with CEP290-504.

TABLE 11

| Upstream gRNA (SEQ ID NO) | | Downstream gRNA (SEQ ID NO) | |
|---|---|---|---|
| CEP290-323 | GTTCTGTCCTCAGTAAAAGGTA | CEP290-11 | GACACTGCCAATAGGG |
| | (SEQ ID NO: 389) | | ATAGGT |
| | (corresponding RNA sequence in | | (SEQ ID NO: 387) |
| | SEQ ID NO: 530) | | (corresponding RNA |
| | | | sequence in SEQ ID NO: |
| | | | 1047) |
| CEP290-323 | GTTCTGTCCTCAGTAAAAGGTA | CEP290-64 | GTCAAAAGCTACCGGT |
| | (SEQ ID NO: 389) | | TACCTG (SEQ ID NO: |
| | | | 388) |
| | | | (corresponding RNA |
| | | | sequence in SEQ ID NO: |
| | | | 558) |
| CEP290-490 | GAATAGTTTGTTCTGGGTAC | CEP290-496 | GATGCAGAACTAGTGT |
| | (SEQ ID NO: 390) | | AGAC (SEQ ID NO: 392) |
| | (corresponding RNA sequence in | | (corresponding RNA |
| | SEQ ID NO: 468) | | sequence in SEQ ID NO: |
| | | | 460) |
| CEP290-490 | GAATAGTTTGTTCTGGGTAC | CEP290-502 | GTCACATGGGAGTCAC |
| | (SEQ ID NO: 390) | | AGGG (SEQ ID NO: 393) |
| | | | (corresponding RNA |
| | | | sequence in SEQ ID NO: |
| | | | 586) |
| CEP290-490 | GAATAGTTTGTTCTGGGTAC | CEP290-504 | GAGTATCTCCTGTTTGG |
| | (SEQ ID NO: 390) | | CA |
| | | | (SEQ ID NO: 394) |
| | | | (corresponding RNA |
| | | | sequence in SEQ ID NO: |
| | | | 568) |
| CEP290-492 | GAGAAAGGGATGGGCACTTA | CEP290-502 | GTCACATGGGAGTCAC |
| | (SEQ ID NO: 391) | | AGGG |
| | (corresponding RNA sequence in | | (SEQ ID NO: 393) |
| | SEQ ID NO: 538) | | |
| CEP290-492 | GAGAAAGGGATGGGCACTTA | CEP290-504 | GAGTATCTCCTGTTTGG |
| | (SEQ ID NO: 391) | | CA |
| | | | (SEQ ID NO: 394) |

### IV. RNA-Guided Nucleases

[0927] RNA-guided nucleases according to the present disclosure include, without limitation, naturally-occurring Class 2 CRISPR nucleases such as Cas9, and Cpf1, as well as other nucleases derived or obtained therefrom. In functional terms, RNA-guided nucleases are defined as those nucleases that: (a) interact with (e.g., complex with) a gRNA; and (b) together with the gRNA, associate with, and optionally cleave or modify, a target region of a DNA that includes (i) a sequence complementary to the targeting domain of the gRNA and, optionally, (ii) an additional sequence referred to as a “protospacer adjacent motif,” or “PAM,” which is described in greater detail below. As the following examples will illustrate, RNA-guided nucleases can be defined, in broad terms, by their PAM specificity and cleavage activity, even though variations may exist between individual RNA-guided nucleases that share the same PAM specificity or cleavage activity. Skilled artisans will appreciate that some aspects of the present disclosure relate to systems, methods and compositions that can be implemented using any suitable RNA-guided nuclease having a certain PAM specificity and/or cleavage activity. For this reason, unless otherwise specified, the term RNA-guided nuclease should be understood as a generic term, and not limited to any particular type (e.g., Cas9 vs. Cpf1), species (e.g., S. pyogenes vs. S. aureus) or variation (e.g., full-length vs. truncated or split; naturally-occurring PAM specificity vs. engineered PAM specificity).

[0928] Turning to the PAM sequence, this structure takes its name from its sequential relationship to the “protospacer” sequence that is complementary to gRNA targeting domains (or “spacers”). Together with protospacer sequences, PAM sequences define target regions or sequences for specific RNA-guided nuclease/gRNA combinations.

[0929] Various RNA-guided nucleases may require different sequential relationships between PAMs and protospacers. In general, Cas9s recognize PAM sequences that are 5′ of the protospacer as visualized relative to the top or complementary strand.

[0930] In addition to recognizing specific sequential orientations of PAMs and protospacers, RNA-guided nucleases generally recognize specific PAM sequences. S. aureus Cas9, for example, recognizes a PAM sequence of NNGRRT, wherein the N sequences are immediately 3′ of the region recognized by the gRNA targeting domain. S. pyogenes Cas9 recognizes NGG PAM sequences. It should also be noted that engineered RNA-guided nucleases can have PAM specificities that differ from the PAM specificities of similar nucleases (such as the naturally occurring variant from which an RNA-guided nuclease is derived, or the naturally occurring variant having the greatest amino acid sequence homology to an engineered RNA-guided nuclease). Modified Cas9s that recognize alternate PAM sequences are described below.

[0931] RNA-guided nucleases are also characterized by their DNA cleavage activity: naturally-occurring RNA-guided nucleases typically form DSBs in target nucleic acids, but engineered variants have been produced that generate only SSBs (discussed above; see also Ran 2013, incorporated by reference herein), or that do not cut at all.

### Cas9 Molecules

[0932] Crystal structures have been determined for S. pyogenes Cas9 (Jinek 2014), and for S. aureus Cas9 in complex with a unimolecular gRNA and a target DNA (Nishimasu 2014; Anders 2014; and Nishimasu 2015).

[0933] Cas9 molecules of a variety of species can be used in the methods and compositions described herein. While the S. pyogenes, S. aureus, and S. thermophilus Cas9 molecules are the subject of much of the disclosure herein, Cas9 molecules of, derived from, or based on the Cas9 proteins of other species listed herein can be used as well. In other words, while the much of the description herein uses S. pyogenes and S. thermophilus Cas9 molecules Cas9 molecules from the other species can replace them. Such species include: Acidovorax avenae, Actinobacillus pleuropneumoniae, Actinobacillus succinogenes, Actinobacillus suis, Actinomyces sp., Cycliphilus denitrificans, Aminomonas paucivorans, Bacillus cereus, Bacillus smithii, Bacillus thuringiensis, Bacteroides sp., Blastopirellula marina, Bradyrhizobium sp., Brevibacillus laterosporus, Campylobacter coli, Campylobacter jejuni, Campylobacter lari, Candidatus puniceispirillum, Clostridium cellulolyticum, Clostridium perfringens, Corynebacterium accolens, Corynebacterium diphtheria, Corynebacterium matruchotii, Dinoroseobacter shibae, Eubacterium dolichum, Gammaproteobacterium, Gluconacetobacter diazotrophicus, Haemophilus parainfluenzae, Haemophilus sputorum, Helicobacter canadensis, Helicobacter cinaedi, Helicobacter mustelae, Ilyobacter polytropus, Kingella kingae, Lactobacillus crispatus, Listeria ivanovii, Listeria monocytogenes, Listeriaceae bacterium, Methylocystis sp., Methylosinus trichosporium, Mobiluncus mulieris, Neisseria bacilliformis, Neisseria cinerea, Neisseria flavescens, Neisseria lactamica, Neisseria meningitidis, Neisseria sp., Neisseria wadsworthii, Nitrosomonas sp., Parvibaculum lavamentivorans, Pasteurella multocida, Phascolarctobacterium succinatutens, Ralstonia syzygii, Rhodopseudomonas palustris, Rhodovulum sp., Simonsiella muelleri, Sphingomonas sp., Sporolactobacillus vineae, Staphylococcus aureus, Staphylococcus lugdunensis, Streptococcus sp., Subdoligranulum sp., Tistrella mobilis, Treponema sp., or Verminephrobacter eiseniae.

[0934] A Cas9 molecule, or Cas9 polypeptide, as that term is used herein, refers to a molecule or polypeptide that can interact with a guide RNA (gRNA) molecule and, in concert with the gRNA molecule, homes or localizes to a site which comprises a target domain and PAM sequence. Cas9 molecule and Cas9 polypeptide, as those terms are used herein, refer to naturally occurring Cas9 molecules and to engineered, altered, or modified Cas9 molecules or Cas9 polypeptides that differ, e.g., by at least one amino acid residue, from a reference sequence, e.g., the most similar naturally occurring Cas9 molecule or a sequence of Table 12.

### Cas9 Domains

[0935] Crystal structures have been determined for two different naturally occurring bacterial Cas9 molecules (Jinek 2014) and for S. pyogenes Cas9 with a guide RNA (e.g., a synthetic fusion of crRNA and tracrRNA) (Nishimasu 2014; Anders 2014).

[0936] A naturally occurring Cas9 molecule comprises two lobes: a recognition (REC) lobe and a nuclease (NUC) lobe; each of which further comprises domains described herein. FIGS. 8A-8B provide a schematic of the organization of important Cas9 domains in the primary structure. The domain nomenclature and the numbering of the amino acid residues encompassed by each domain used throughout this disclosure is as described in Nishimasu 2014. The numbering of the amino acid residues is with reference to Cas9 from S. pyogenes.

[0937] The REC lobe comprises the arginine-rich bridge helix (BH), the REC1 domain, and the REC2 domain. The REC lobe does not share structural similarity with other known proteins, indicating that it is a Cas9-specific functional domain. The BH domain is a long a helix and arginine rich region and comprises amino acids 60-93 of the sequence of S. pyogenes Cas9. The REC1 domain is important for recognition of the repeat:anti-repeat duplex, e.g., of a gRNA or a tracrRNA, and is therefore critical for Cas9 activity by recognizing the target sequence. The REC1 domain comprises two REC1 motifs at amino acids 94 to 179 and 308 to 717 of the sequence of S. pyogenes Cas9. These two REC1 domains, though separated by the REC2 domain in the linear primary structure, assemble in the tertiary structure to form the REC1 domain. The REC2 domain, or parts thereof, may also play a role in the recognition of the repeat:anti-repeat duplex. The REC2 domain comprises amino acids 180-307 of the sequence of S. pyogenes Cas9.

[0938] The NUC lobe comprises the RuvC domain (also referred to herein as RuvC-like domain), the HNH domain (also referred to herein as HNH-like domain), and the PAM-interacting (PI) domain. The RuvC domain shares structural similarity to retroviral integrase superfamily members and cleaves a single strand, e.g., the non-complementary strand of the target nucleic acid molecule. The RuvC domain is assembled from the three split RuvC motifs (RuvC I, RuvCII, and RuvCIII, which are often commonly referred to in the art as RuvCI domain, or N-terminal RuvC domain, RuvCII domain, and RuvCIII domain) at amino acids 1-59, 718-769, and 909-1098, respectively, of the sequence of S. pyogenes Cas9. Similar to the REC1 domain, the three RuvC motifs are linearly separated by other domains in the primary structure, however in the tertiary structure, the three RuvC motifs assemble and form the RuvC domain. The HNH domain shares structural similarity with HNH endonucleases, and cleaves a single strand, e.g., the complementary strand of the target nucleic acid molecule. The HNH domain lies between the RuvC II-III motifs and comprises amino acids 775-908 of the sequence of S. pyogenes Cas9. The PI domain interacts with the PAM of the target nucleic acid molecule, and comprises amino acids 1099-1368 of the sequence of S. pyogenes Cas9.

### RuvC-Like Domain and HNH-Like Domain

[0939] In an embodiment, a Cas9 molecule or Cas9 polypeptide comprises an HNH-like domain and a RuvC-like domain. In an embodiment, cleavage activity is dependent on a RuvC-like domain and an HNH-like domain. A Cas9 molecule or Cas9 polypeptide, e.g., an eaCas9 molecule or eaCas9 polypeptide, can comprise one or more of the following domains: a RuvC-like domain and an HNH-like domain. In an embodiment, a Cas9 molecule or Cas9 polypeptide is an eaCas9 molecule or eaCas9 polypeptide and the eaCas9 molecule or eaCas9 polypeptide comprises a RuvC-like domain, e.g., a RuvC-like domain described below, and/or an HNH-like domain, e.g., an HNH-like domain described below.

### RuvC-Like Domains

[0940] In an embodiment, a RuvC-like domain cleaves, a single strand, e.g., the non-complementary strand of the target nucleic acid molecule. The Cas9 molecule or Cas9 polypeptide can include more than one RuvC-like domain (e.g., one, two, three or more RuvC-like domains). In an embodiment, a RuvC-like domain is at least 5, 6, 7, 8 amino acids in length but not more than 20, 19, 18, 17, 16 or 15 amino acids in length. In an embodiment, the Cas9 molecule or Cas9 polypeptide comprises an N-terminal RuvC-like domain of about 10 to 20 amino acids, e.g., about 15 amino acids in length.

### N-Terminal RuvC-Like Domains

[0941] Some naturally occurring Cas9 molecules comprise more than one RuvC-like domain with cleavage being dependent on the N-terminal RuvC-like domain. Accordingly, Cas9 molecules or Cas9 polypeptide can comprise an N-terminal RuvC-like domain. Exemplary N-terminal RuvC-like domains are described below.

[0942] In an embodiment, an eaCas9 molecule or eaCas9 polypeptide comprises an N-terminal RuvC-like domain comprising an amino acid sequence of formula I:

(SEQ ID NO: 8)

D-X1-G-X2-X3-X4-X5-G-X6-X7-X8-X9,

[0943] wherein,

[0944] X1 is selected from I, V, M, L and T (e.g., selected from I, V, and L);

[0945] X2 is selected from T, I, V, S, N, Y, E and L (e.g., selected from T, V, and I);

[0946] X3 is selected from N, S, G, A, D, T, R, M and F (e.g., A or N);

[0947] X4 is selected from S, Y, N and F (e.g., S);

[0948] X5 is selected from V, I, L, C, T and F (e.g., selected from V, I and L);

[0949] X6 is selected from W, F, V, Y, S and L (e.g., W);

[0950] X7 is selected from A, S, C, V and G (e.g., selected from A and S);

[0951] X8 is selected from V, I, L, A, M and H (e.g., selected from V, I, M and L); and

[0952] X9 is selected from any amino acid or is absent, designated by Δ (e.g., selected from T, V, I, L, Δ, F, S, A, Y, M and R, or, e.g., selected from T, V, I, L and Δ).

[0953] In an embodiment, the N-terminal RuvC-like domain differs from a sequence of SEQ ID NO: 8, by as many as 1 but no more than 2, 3, 4, or 5 residues.

[0954] In embodiment, the N-terminal RuvC-like domain is cleavage competent.

[0955] In embodiment, the N-terminal RuvC-like domain is cleavage incompetent.

[0956] In an embodiment, a eaCas9 molecule or eaCas9 polypeptide comprises an N-terminal RuvC-like domain comprising an amino acid sequence of formula II:

(SEQ ID NO: 9)

D-X1-G-X2-X3-S-X5-G-X6-X7-X8-X9,,

[0957] wherein

[0958] X1 is selected from I, V, M, L and T (e.g., selected from I, V, and L);

[0959] X2 is selected from T, I, V, S, N, Y, E and L (e.g., selected from T, V, and I);

[0960] X3 is selected from N, S, G, A, D, T, R, M and F (e.g., A or N);

[0961] X5 is selected from V, I, L, C, T and F (e.g., selected from V, I and L);

[0962] X6 is selected from W, F, V, Y, S and L (e.g., W);

[0963] X7 is selected from A, S, C, V and G (e.g., selected from A and S);

[0964] X8 is selected from V, I, L, A, M and H (e.g., selected from V, I, M and L); and

[0965] X9 is selected from any amino acid or is absent (e.g., selected from T, V, I, L, Δ, F, S, A, Y, M and R or selected from e.g., T, V, I, L and Δ).

[0966] In an embodiment, the N-terminal RuvC-like domain differs from a sequence of SEQ ID NO:9 by as many as 1 but no more than 2, 3, 4, or 5 residues.

[0967] In an embodiment, the N-terminal RuvC-like domain comprises an amino acid sequence of formula III:

(SEQ ID NO: 10)

D-I-G-X2-X3-S-V-G-W-A-X8-X9,

[0968] wherein

[0969] X2 is selected from T, I, V, S, N, Y, E and L (e.g., selected from T, V, and I);

[0970] X3 is selected from N, S, G, A, D, T, R, M and F (e.g., A or N);

[0971] X8 is selected from V, I, L, A, M and H (e.g., selected from V, I, M and L); and

[0972] X9 is selected from any amino acid or is absent (e.g., selected from T, V, I, L, Δ, F, S, A, Y, M and R or selected from e.g., T, V, I, L and Δ).

[0973] In an embodiment, the N-terminal RuvC-like domain differs from a sequence of SEQ ID NO: 10 by as many as 1 but no more than, 2, 3, 4, or 5 residues.

[0974] In an embodiment, the N-terminal RuvC-like domain comprises an amino acid sequence of formula III:

(SEQ ID NO: 11)

D-I-G-T-N-S-V-G-W-A-V-X,

[0975] wherein

[0976] X is a non-polar alkyl amino acid or a hydroxyl amino acid, e.g., X is selected from V, I, L and T (e.g., the eaCas9 molecule can comprise an N-terminal RuvC-like domain shown in FIGS. 2A-2G (is depicted as Y)).

[0977] In an embodiment, the N-terminal RuvC-like domain differs from a sequence of SEQ ID NO: 11 by as many as 1 but no more than, 2, 3, 4, or 5 residues.

[0978] In an embodiment, the N-terminal RuvC-like domain differs from a sequence of an N-terminal RuvC like domain disclosed herein, e.g., in FIGS. 3A-3B or FIGS. 7A-7B, as many as 1 but no more than 2, 3, 4, or 5 residues. In an embodiment, 1, 2, or all 3 of the highly conserved residues identified in FIGS. 3A-3B or FIGS. 7A-7B are present.

[0979] In an embodiment, the N-terminal RuvC-like domain differs from a sequence of an N-terminal RuvC-like domain disclosed herein, e.g., in FIGS. 4A-4B or FIGS. 7A-7B, as many as 1 but no more than 2, 3, 4, or 5 residues. In an embodiment, 1, 2, 3 or all 4 of the highly conserved residues identified in FIGS. 4A-4B or FIGS. 7A-7B are present.

### Additional RuvC-Like Domains

[0980] In addition to the N-terminal RuvC-like domain, the Cas9 molecule or Cas9 polypeptide, e.g., an eaCas9 molecule or eaCas9 polypeptide, can comprise one or more additional RuvC-like domains. In an embodiment, the Cas9 molecule or Cas9 polypeptide can comprise two additional RuvC-like domains. Preferably, the additional RuvC-like domain is at least 5 amino acids in length and, e.g., less than 15 amino acids in length, e.g., 5 to 10 amino acids in length, e.g., 8 amino acids in length.

[0981] An additional RuvC-like domain can comprise an amino acid sequence:

(SEQ ID NO: 12)

I-X1-X2-E-X3-A-R-E,

wherein

[0982] X1 is V or H,

[0983] X2 is I, L or V (e.g., I or V); and

[0984] X3 is M or T.

[0985] In an embodiment, the additional RuvC-like domain comprises the amino acid sequence:

I-V-X2-E-M-A-R-E (SEQ ID NO: 13),

wherein

[0986] X2 is I, L or V (e.g., I or V) (e.g., the eaCas9 molecule or eaCas9 polypeptide can comprise an additional RuvC-like domain shown in FIG. 2A-2G or FIGS. 7A-7B (depicted as B)).

[0987] An additional RuvC-like domain can comprise an amino acid sequence:

(SEQ ID NO: 14)

H-H-A-X1-D-A-X2-X3,

[0988] X1 is H or L;

[0989] X2 is R or V; and

[0990] X3 is E or V.

[0991] In an embodiment, the additional RuvC-like domain comprises the amino acid sequence:

H-H-A-H-D-A-Y-L (SEQ ID NO: 15).

[0992] In an embodiment, the additional RuvC-like domain differs from a sequence of SEQ ID NOs: 13, 15, 12 or 14 by as many as 1 but no more than 2, 3, 4, or 5 residues.

[0993] In some embodiments, the sequence flanking the N-terminal RuvC-like domain is a sequences of formula V:

(SEQ ID NO: 16)

K-X1′-Y-X2′-X3′-X4′-Z-T-D-X9′-Y,.

[0994] wherein

[0995] X1′ is selected from K and P,

[0996] X2′ is selected from V, L, I, and F (e.g., V, I and L);

[0997] X3′ is selected from G, A and S (e.g., G),

[0998] X4′ is selected from L, I, V and F (e.g., L);

[0999] X9′ is selected from D, E, N and Q; and

[1000] Z is an N-terminal RuvC-like domain, e.g., as described above.

### HNH-Like Domains

[1001] In an embodiment, an HNH-like domain cleaves a single stranded complementary domain, e.g., a complementary strand of a double stranded nucleic acid molecule. In an embodiment, an HNH-like domain is at least 15, 20, 25 amino acids in length but not more than 40, 35 or 30 amino acids in length, e.g., 20 to 35 amino acids in length, e.g., 25 to 30 amino acids in length. Exemplary HNH-like domains are described below.

[1002] In an embodiment, an eaCas9 molecule or eaCas9 polypeptide comprises an HNH-like domain having an amino acid sequence of formula VI:

(SEQ ID NO: 17)

X1-X2-X3-H-X4-X5-P-X6-X7-X8-X9-X10-X11-X12-X13-
X14-X15-N-X16-X17-X18-X19-X20-X21-X22-X23-N,

wherein

[1003] X1 is selected from D, E, Q and N (e.g., D and E);

[1004] X2 is selected from L, I, R, Q, V, M and K;

[1005] X3 is selected from D and E;

[1006] X4 is selected from I, V, T, A and L (e.g., A, I and V);

[1007] X5 is selected from V, Y, I, L, F and W (e.g., V, I and L);

[1008] X6 is selected from Q, H, R, K, Y, I, L, F and W;

[1009] X7 is selected from S, A, D, T and K (e.g., S and A);

[1010] X8 is selected from F, L, V, K, Y, M, I, R, A, E, D and Q (e.g., F);

[1011] X9 is selected from L, R, T, I, V, S, C, Y, K, F and G;

[1012] X10 is selected from K, Q, Y, T, F, L, W, M, A, E, G, and S;

[1013] X11 is selected from D, S, N, R, L and T (e.g., D);

[1014] X12 is selected from D, N and S;

[1015] X13 is selected from S, A, T, G and R (e.g., S);

[1016] X14 is selected from I, L, F, S, R, Y, Q, W, D, K and H (e.g., I, L and F);

[1017] X15 is selected from D, S, I, N, E, A, H, F, L, Q, M, G, Y and V;

[1018] X16 is selected from K, L, R, M, T and F (e.g., L, R and K);

[1019] X17 is selected from V, L, I, A and T;

[1020] X18 is selected from L, I, V and A (e.g., L and I);

[1021] X19 is selected from T, V, C, E, S and A (e.g., T and V);

[1022] X20 is selected from R, F, T, W, E, L, N, C, K, V, S, Q, I, Y, H and A;

[1023] X21 is selected from S, P, R, K, N, A, H, Q, G and L;

[1024] X22 is selected from D, G, T, N, S, K, A, I, E, L, Q, R and Y; and

[1025] X23 is selected from K, V, A, E, Y, I, C, L, S, T, G, K, M, D and F.

[1026] In an embodiment, a HNH-like domain differs from a sequence of SEQ ID NO: 16 by at least one but no more than, 2, 3, 4, or 5 residues.

[1027] In an embodiment, the HNH-like domain is cleavage competent.

[1028] In an embodiment, the HNH-like domain is cleavage incompetent.

[1029] In an embodiment, an eaCas9 molecule or eaCas9 polypeptide comprises an HNH-like domain comprising an amino acid sequence of formula VII:

(SEQ ID NO: 18)

X1-X2-X3-H-X4-X5-P-X6-S-X8-X9-X10-D-D-S-X14-X15-N-
K-V-L-X19-X20-X21-X22-X23-N,

[1030] wherein

[1031] X1 is selected from D and E;

[1032] X2 is selected from L, I, R, Q, V, M and K;

[1033] X3 is selected from D and E;

[1034] X4 is selected from I, V, T, A and L (e.g., A, I and V);

[1035] X5 is selected from V, Y, I, L, F and W (e.g., V, I and L);

[1036] X6 is selected from Q, H, R, K, Y, I, L, F and W;

[1037] X8 is selected from F, L, V, K, Y, M, I, R, A, E, D and Q (e.g., F);

[1038] X9 is selected from L, R, T, I, V, S, C, Y, K, F and G;

[1039] X10 is selected from K, Q, Y, T, F, L, W, M, A, E, G, and S;

[1040] X14 is selected from I, L, F, S, R, Y, Q, W, D, K and H (e.g., I, L and F);

[1041] X15 is selected from D, S, I, N, E, A, H, F, L, Q, M, G, Y and V;

[1042] X19 is selected from T, V, C, E, S and A (e.g., T and V);

[1043] X20 is selected from R, F, T, W, E, L, N, C, K, V, S, Q, I, Y, H and A;

[1044] X21 is selected from S, P, R, K, N, A, H, Q, G and L;

[1045] X22 is selected from D, G, T, N, S, K, A, I, E, L, Q, R and Y; and

[1046] X23 is selected from K, V, A, E, Y, I, C, L, S, T, G, K, M, D and F.

[1047] In an embodiment, the HNH-like domain differs from a sequence of SEQ ID NO: 15 by 1, 2, 3, 4, or 5 residues.

[1048] In an embodiment, an eaCas9 molecule or eaCas9 polypeptide comprises an HNH-like domain comprising an amino acid sequence of formula VII:

(SEQ ID NO: 19)

X1-V-X3-H-I-V-P-X6-S-X8-X9-X10-D-D-S-X14-X15-N-K-
V-L-T-X20-X21-X22-X23-N,

[1049] wherein

[1050] X1 is selected from D and E;

[1051] X3 is selected from D and E;

[1052] X6 is selected from Q, H, R, K, Y, I, L and W;

[1053] X8 is selected from F, L, V, K, Y, M, I, R, A, E, D and Q (e.g., F);

[1054] X9 is selected from L, R, T, I, V, S, C, Y, K, F and G;

[1055] X10 is selected from K, Q, Y, T, F, L, W, M, A, E, G, and S;

[1056] X14 is selected from I, L, F, S, R, Y, Q, W, D, K and H (e.g., I, L and F);

[1057] X15 is selected from D, S, I, N, E, A, H, F, L, Q, M, G, Y and V;

[1058] X20 is selected from R, F, T, W, E, L, N, C, K, V, S, Q, I, Y, H and A;

[1059] X21 is selected from S, P, R, K, N, A, H, Q, G and L;

[1060] X22 is selected from D, G, T, N, S, K, A, I, E, L, Q, R and Y; and

[1061] X23 is selected from K, V, A, E, Y, I, C, L, S, T, G, K, M, D and F.

[1062] In an embodiment, the HNH-like domain differs from a sequence of SEQ ID NO:GG by 1, 2, 3, 4, or 5 residues.

[1063] In an embodiment, an eaCas9 molecule or eaCas9 polypeptide comprises an HNH-like domain having an amino acid sequence of formula VIII:

(SEQ ID NO: 20)

D-X2-D-H-I-X5-P-Q-X7-F-X9-X10-D-X12-S-I-D-N-X16-V-
L-X19-X20-S-X22-X23-N,

[1064] wherein

[1065] X2 is selected from I and V;

[1066] X5 is selected from I and V;

[1067] X7 is selected from A and S;

[1068] X9 is selected from I and L;

[1069] X10 is selected from K and T;

[1070] X12 is selected from D and N;

[1071] X16 is selected from R, K and L; X19 is selected from T and V;

[1072] X20 is selected from S and R;

[1073] X22 is selected from K, D and A; and

[1074] X23 is selected from E, K, G and N (e.g., the eaCas9 molecule or eaCas9 polypeptide can comprise an HNH-like domain as described herein).

[1075] In an embodiment, the HNH-like domain differs from a sequence of SEQ ID NO: 19 by as many as 1 but no more than 2, 3, 4, or 5 residues.

[1076] In an embodiment, an eaCas9 molecule or eaCas9 polypeptide comprises the amino acid sequence of formula IX:

(SEQ ID NO: 21)

L-Y-Y-L-Q-N-G-X1′-D-M-Y-X2′-X3′-X4′-X5′-L-D-I-X6′-
X7′-L-S-X8′-Y-Z-N-R-X9′-K-X10′-D-X11′-V-P,

[1077] wherein

[1078] X1′ is selected from K and R;

[1079] X2′ is selected from V and T;

[1080] X3′ is selected from G and D;

[1081] X4′ is selected from E, Q and D;

[1082] X5′ is selected from E and D;

[1083] X6′ is selected from D, N and H;

[1084] X7′ is selected from Y, R and N;

[1085] X8′ is selected from Q, D and N; X9′ is selected from G and E;

[1086] X10′ is selected from S and G;

[1087] X11′ is selected from D and N; and

[1088] Z is an HNH-like domain, e.g., as described above.

[1089] In an embodiment, the eaCas9 molecule or eaCas9 polypeptide comprises an amino acid sequence that differs from a sequence of SEQ ID NO: 21 by as many as 1 but no more than 2, 3, 4, or 5 residues.

[1090] In an embodiment, the HNH-like domain differs from a sequence of an HNH-like domain disclosed herein, e.g., in FIGS. 5A-5C or FIGS. 7A-7B, as many as 1 but no more than 2, 3, 4, or 5 residues. In an embodiment, 1 or both of the highly conserved residues identified in FIGS. 5A-5C or FIGS. 7A-7B are present.

[1091] In an embodiment, the HNH-like domain differs from a sequence of an HNH-like domain disclosed herein, e.g., in FIGS. 6A-6B or FIGS. 7A-7B, as many as 1 but no more than 2, 3, 4, or 5 residues. In an embodiment, 1, 2, all 3 of the highly conserved residues identified in FIGS. 6A-6B or FIGS. 7A-7B are present.

### Cas9 Activities

### Nuclease and Helicase Activities

[1092] In an embodiment, the Cas9 molecule or Cas9 polypeptide is capable of cleaving a target nucleic acid molecule. Typically wild type Cas9 molecules cleave both strands of a target nucleic acid molecule. Cas9 molecules and Cas9 polypeptides can be engineered to alter nuclease cleavage (or other properties), e.g., to provide a Cas9 molecule or Cas9 polypeptide which is a nickase, or which lacks the ability to cleave target nucleic acid. A Cas9 molecule or Cas9 polypeptide that is capable of cleaving a target nucleic acid molecule is referred to herein as an eaCas9 molecule or eaCas9 polypeptide.

[1093] In an embodiment, an eaCas9 molecule or eaCas9 polypeptide comprises one or more of the following activities:

[1094] a nickase activity, i.e., the ability to cleave a single strand, e.g., the non-complementary strand or the complementary strand, of a nucleic acid molecule;

[1095] a double stranded nuclease activity, i.e., the ability to cleave both strands of a double stranded nucleic acid and create a double stranded break, which in an embodiment is the presence of two nickase activities;

[1096] an endonuclease activity;

[1097] an exonuclease activity; and

[1098] a helicase activity, i.e., the ability to unwind the helical structure of a double stranded nucleic acid.

[1099] In an embodiment, an enzymatically active or eaCas9 molecule or eaCas9 polypeptide cleaves both strands and results in a double stranded break. In an embodiment, an eaCas9 molecule cleaves only one strand, e.g., the strand to which the gRNA hybridizes to, or the strand complementary to the strand the gRNA hybridizes with. In an embodiment, an eaCas9 molecule or eaCas9 polypeptide comprises cleavage activity associated with an HNH-like domain. In an embodiment, an eaCas9 molecule or eaCas9 polypeptide comprises cleavage activity associated with an N-terminal RuvC-like domain. In an embodiment, an eaCas9 molecule or eaCas9 polypeptide comprises cleavage activity associated with an HNH-like domain and cleavage activity associated with an N-terminal RuvC-like domain. In an embodiment, an eaCas9 molecule or eaCas9 polypeptide comprises an active, or cleavage competent, HNH-like domain and an inactive, or cleavage incompetent, N-terminal RuvC-like domain. In an embodiment, an eaCas9 molecule or eaCas9 polypeptide comprises an inactive, or cleavage incompetent, HNH-like domain and an active, or cleavage competent, N-terminal RuvC-like domain.

[1100] Some Cas9 molecules or Cas9 polypeptides have the ability to interact with a gRNA molecule, and in conjunction with the gRNA molecule localize to a core target domain, but are incapable of cleaving the target nucleic acid, or incapable of cleaving at efficient rates. Cas9 molecules having no, or no substantial, cleavage activity are referred to herein as an eiCas9 molecule or eiCas9 polypeptide. For example, an eiCas9 molecule or eiCas9 polypeptide can lack cleavage activity or have substantially less, e.g., less than 20, 10, 5, 1 or 0.1% of the cleavage activity of a reference Cas9 molecule or eiCas9 polypeptide, as measured by an assay described herein.

### Targeting and PAMs

[1101] RNA guided nucleases, such as Cas9 molecules or Cas9 polypeptides, generally, interact with a guide RNA (gRNA) molecule and, in concert with the gRNA molecule, localize to a site which comprises a target domain and a PAM sequence.

[1102] In an embodiment, the ability of an eaCas9 molecule or eaCas9 polypeptide to interact with and cleave a target nucleic acid is PAM sequence dependent. A PAM sequence is a sequence in the target nucleic acid. In an embodiment, cleavage of the target nucleic acid occurs upstream from the PAM sequence. EaCas9 molecules from different bacterial species can recognize different sequence motifs (e.g., PAM sequences). In an embodiment, an eaCas9 molecule of S. pyogenes recognizes the sequence motif NGG, NAG, NGA and directs cleavage of a target nucleic acid sequence 1 to 10, e.g., 3 to 5, base pairs upstream from that sequence. See, e.g., Mali 2013. In an embodiment, an eaCas9 molecule of S. thermophilus recognizes the sequence motif NGGNG and NNAGAAW (W=A or T) and directs cleavage of a core target nucleic acid sequence 1 to 10, e.g., 3 to 5, base pairs upstream from these sequences. See, e.g., Horvath 2010 and Deveau 2008. In an embodiment, an eaCas9 molecule of S. mutans recognizes the sequence motif NGG and/or NAAR (R=A or G) and directs cleavage of a core target nucleic acid sequence 1 to 10, e.g., 3 to 5 base pairs, upstream from this sequence. See, e.g., Deveau 2008. In an embodiment, an eaCas9 molecule of S. aureus recognizes the sequence motif NNGRR (R=A or G) and directs cleavage of a target nucleic acid sequence 1 to 10, e.g., 3 to 5, base pairs upstream from that sequence. In an embodiment, an eaCas9 molecule of S. aureus recognizes the sequence motif NNGRRN (R=A or G) and directs cleavage of a target nucleic acid sequence 1 to 10, e.g., 3 to 5, base pairs upstream from that sequence. In an embodiment, an eaCas9 molecule of S. aureus recognizes the sequence motif NNGRRT (R=A or G) and directs cleavage of a target nucleic acid sequence 1 to 10, e.g., 3 to 5, base pairs upstream from that sequence. In an embodiment, an eaCas9 molecule of S. aureus recognizes the sequence motif NNGRRV (R=A or G, V=A, G or C) and directs cleavage of a target nucleic acid sequence 1 to 10, e.g., 3 to 5, base pairs upstream from that sequence. In an embodiment, an eaCas9 molecule of Neisseria meningitidis recognizes the sequence motif NNNNGATT or NNNGCTT and directs cleavage of a target nucleic acid sequence 1 to 10, e.g., 3 to 5, base pairs upstream from that sequence. See, e.g., Hou 2013. The ability of a Cas9 molecule to recognize a PAM sequence can be determined, e.g., using a transformation assay described in Jinek 2012. In the aforementioned embodiments, N can be any nucleotide residue, e.g., any of A, G, C or T.

[1103] As is discussed herein, Cas9 molecules can be engineered to alter the PAM specificity of the Cas9 molecule.

[1104] Exemplary naturally occurring Cas9 molecules are described in Chylinski 2013. Such Cas9 molecules include Cas9 molecules of a cluster 1 bacterial family, cluster 2 bacterial family, cluster 3 bacterial family, cluster 4 bacterial family, cluster 5 bacterial family, cluster 6 bacterial family, a cluster 7 bacterial family, a cluster 8 bacterial family, a cluster 9 bacterial family, a cluster 10 bacterial family, a cluster 11 bacterial family, a cluster 12 bacterial family, a cluster 13 bacterial family, a cluster 14 bacterial family, a cluster 15 bacterial family, a cluster 16 bacterial family, a cluster 17 bacterial family, a cluster 18 bacterial family, a cluster 19 bacterial family, a cluster 20 bacterial family, a cluster 21 bacterial family, a cluster 22 bacterial family, a cluster 23 bacterial family, a cluster 24 bacterial family, a cluster 25 bacterial family, a cluster 26 bacterial family, a cluster 27 bacterial family, a cluster 28 bacterial family, a cluster 29 bacterial family, a cluster 30 bacterial family, a cluster 31 bacterial family, a cluster 32 bacterial family, a cluster 33 bacterial family, a cluster 34 bacterial family, a cluster 35 bacterial family, a cluster 36 bacterial family, a cluster 37 bacterial family, a cluster 38 bacterial family, a cluster 39 bacterial family, a cluster 40 bacterial family, a cluster 41 bacterial family, a cluster 42 bacterial family, a cluster 43 bacterial family, a cluster 44 bacterial family, a cluster 45 bacterial family, a cluster 46 bacterial family, a cluster 47 bacterial family, a cluster 48 bacterial family, a cluster 49 bacterial family, a cluster 50 bacterial family, a cluster 51 bacterial family, a cluster 52 bacterial family, a cluster 53 bacterial family, a cluster 54 bacterial family, a cluster 55 bacterial family, a cluster 56 bacterial family, a cluster 57 bacterial family, a cluster 58 bacterial family, a cluster 59 bacterial family, a cluster 60 bacterial family, a cluster 61 bacterial family, a cluster 62 bacterial family, a cluster 63 bacterial family, a cluster 64 bacterial family, a cluster 65 bacterial family, a cluster 66 bacterial family, a cluster 67 bacterial family, a cluster 68 bacterial family, a cluster 69 bacterial family, a cluster 70 bacterial family, a cluster 71 bacterial family, a cluster 72 bacterial family, a cluster 73 bacterial family, a cluster 74 bacterial family, a cluster 75 bacterial family, a cluster 76 bacterial family, a cluster 77 bacterial family, or a cluster 78 bacterial family.

[1105] Exemplary naturally occurring Cas9 molecules include a Cas9 molecule of a cluster 1 bacterial family. Examples include a Cas9 molecule of: S. pyogenes (e.g., strain SF370, MGAS10270, MGAS10750, MGAS2096, MGAS315, MGAS5005, MGAS6180, MGAS9429, NZ131 and SSI-1), S. thermophilus (e.g., strain LMD-9), S. pseudoporcinus (e.g., strain SPIN 20026), S. mutans (e.g., strain UA159, NN2025), S. macacae (e.g., strain NCTC11558), S. gallolyticus (e.g., strain UCN34, ATCC BAA-2069), S. equines (e.g., strain ATCC 9812, MGCS 124), S. dysdalactiae (e.g., strain GGS 124), S. bovis (e.g., strain ATCC 700338), S. anginosus (e.g., strain F0211), S. agalactiae (e.g., strain NEM316, A909), Listeria monocytogenes (e.g., strain F6854), Listeria innocua (L. innocua, e.g., strain Clip 11262), Enterococcus italicus (e.g., strain DSM 15952), or Enterococcus faecium (e.g., strain 1,231,408). Another exemplary Cas9 molecule is a Cas9 molecule of Neisseria meningitidis (Hou 2013).

[1106] In an embodiment, a Cas9 molecule or Cas9 polypeptide, e.g., an eaCas9 molecule or eaCas9 polypeptide, comprises an amino acid sequence:

[1107] having 60%, 65%, 70%, 75%, 80%, 85%, 90%, 95%, 96%, 97%, 98% or 99% homology with;

[1108] differs at no more than, 2, 5, 10, 15, 20, 30, or 40% of the amino acid residues when compared with;

[1109] differs by at least 1, 2, 5, 10 or 20 amino acids but by no more than 100, 80, 70, 60, 50, 40 or 30 amino acids from; or

[1110] is identical to any Cas9 molecule sequence described herein, or a naturally occurring Cas9 molecule sequence, e.g., a Cas9 molecule from a species listed herein or described in Chylinski 2013; Hou 2013; SEQ ID NOs: 1-4. In an embodiment, the Cas9 molecule or Cas9 polypeptide comprises one or more of the following activities: a nickase activity; a double stranded cleavage activity (e.g., an endonuclease and/or exonuclease activity); a helicase activity; or the ability, together with a gRNA molecule, to home to a target nucleic acid.

[1111] In an embodiment, a Cas9 molecule or Cas9 polypeptide comprises the amino acid sequence of the consensus sequence of FIGS. 2A-2G, wherein “*” indicates any amino acid found in the corresponding position in the amino acid sequence of a Cas9 molecule of S. pyogenes, S. thermophilus, S. mutans and L. innocua, and “-” indicates any amino acid. In an embodiment, a Cas9 molecule or Cas9 polypeptide differs from the sequence of the consensus sequence disclosed in FIGS. 2A-2G by at least 1, but no more than 2, 3, 4, 5, 6, 7, 8, 9, or 10 amino acid residues. In an embodiment, a Cas9 molecule or Cas9 polypeptide comprises the amino acid sequence of SEQ ID NO: 7 of FIGS. 7A-7B, wherein “*” indicates any amino acid found in the corresponding position in the amino acid sequence of a Cas9 molecule of S. pyogenes, or N. meningitidis, “-” indicates any amino acid, and “-” indicates any amino acid or absent. In an embodiment, a Cas9 molecule or Cas9 polypeptide differs from the sequence of SEQ ID NOs: 6 or 7 disclosed in FIGS. 7A-7B by at least 1, but no more than 2, 3, 4, 5, 6, 7, 8, 9, or 10 amino acid residues.

[1112] A comparison of the sequence of a number of Cas9 molecules indicate that certain regions are conserved. These are identified below as:

[1113] region 1 (residues1 to 180, or in the case of region 1′ residues 120 to 180) region 2 (residues360 to 480);

[1114] region 3 (residues 660 to 720);

[1115] region 4 (residues 817 to 900); and

[1116] region 5 (residues 900 to 960);

[1117] In an embodiment, a Cas9 molecule or Cas9 polypeptide comprises regions 1-5, together with sufficient additional Cas9 molecule sequence to provide a biologically active molecule, e.g., a Cas9 molecule having at least one activity described herein. In an embodiment, each of regions 1-6, independently, have, 50%, 60%, 70%, or 80% homology with the corresponding residues of a Cas9 molecule or Cas9 polypeptide described herein, e.g., a sequence from FIGS. 2A-2G or from FIGS. 7A-7B.

[1118] In an embodiment, a Cas9 molecule or Cas9 polypeptide, e.g., an eaCas9 molecule or eaCas9 polypeptide, comprises an amino acid sequence referred to as region 1: having 50%, 60%, 70%, 80%, 85%, 90%, 95%, 96%, 97%, 98% or 99% homology with amino acids 1-180 (the numbering is according to the motif sequence in FIGS. 2A-2G; 52% of residues in the four Cas9 sequences in FIGS. 2A-2G are conserved) of the amino acid sequence of Cas9 of S. pyogenes;

[1119] differs by at least 1, 2, 5, 10 or 20 amino acids but by no more than 90, 80, 70, 60, 50, 40 or 30 amino acids from amino acids 1-180 of the amino acid sequence of Cas9 of S. pyogenes, S. thermophilus, S. mutans or L. innocua; or

[1120] is identical to 1-180 of the amino acid sequence of Cas9 of S. pyogenes, S. thermophilus, S. mutans or L. innocua.

[1121] In an embodiment, a Cas9 molecule or Cas9 polypeptide, e.g., an eaCas9 molecule or eaCas9 polypeptide, comprises an amino acid sequence referred to as region 1′:

[1122] having 55%, 60%, 65%, 70%, 75%, 80%, 85%, 90%, 95%, 96%, 97%, 98% or 99% homology with amino acids 120-180 (55% of residues in the four Cas9 sequences in FIGS. 2A-2G are conserved) of the amino acid sequence of Cas9 of S. pyogenes, S. thermophilus, S. mutans or L. innocua;

[1123] differs by at least 1, 2, or 5 amino acids but by no more than 35, 30, 25, 20 or 10 amino acids from amino acids 120-180 of the amino acid sequence of Cas9 of S. pyogenes, S. thermophilus, S. mutans or L. innocua; or

[1124] is identical to 120-180 of the amino acid sequence of Cas9 of S. pyogenes, S. thermophilus, S. mutans or L. innocua.

[1125] In an embodiment, a Cas9 molecule or Cas9 polypeptide, e.g., an eaCas9 molecule or eaCas9 polypeptide, comprises an amino acid sequence referred to as region 2:

[1126] having 50%, 55%, 60%, 65%, 70%, 75%, 80%, 85%, 90%, 95%, 96%, 97%, 98% or 99% homology with amino acids 360-480 (52% of residues in the four Cas9 sequences in FIGS. 2A-2G are conserved) of the amino acid sequence of Cas9 of S. pyogenes, S. thermophilus, S. mutans or L. innocua;

[1127] differs by at least 1, 2, or 5 amino acids but by no more than 35, 30, 25, 20 or 10 amino acids from amino acids 360-480 of the amino acid sequence of Cas9 of S. pyogenes, S. thermophilus, S. mutans or L. innocua; or

[1128] is identical to 360-480 of the amino acid sequence of Cas9 of S. pyogenes, S. thermophilus, S. mutans or L. innocua.

[1129] In an embodiment, a Cas9 molecule or Cas9 polypeptide, e.g., an eaCas9 molecule or eaCas9 polypeptide, comprises an amino acid sequence referred to as region 3:

[1130] having 55%, 60%, 65%, 70%, 75%, 80%, 85%, 90%, 95%, 96%, 97%, 98%, or 99% homology with amino acids 660-720 (56% of residues in the four Cas9 sequences in FIGS. 2A-2G are conserved) of the amino acid sequence of Cas9 of S. pyogenes, S. thermophilus, S. mutans or L. innocua;

[1131] differs by at least 1, 2, or 5 amino acids but by no more than 35, 30, 25, 20 or 10 amino acids from amino acids 660-720 of the amino acid sequence of Cas9 of S. pyogenes, S. thermophilus, S. mutans or L. innocua; or

[1132] is identical to 660-720 of the amino acid sequence of Cas9 of S. pyogenes, S. thermophilus, S. mutans or L. innocua.

[1133] In an embodiment, a Cas9 molecule or Cas9 polypeptide, e.g., an eaCas9 molecule or eaCas9 polypeptide, comprises an amino acid sequence referred to as region 4:

[1134] having 50%, 55%, 60%, 65%, 70%, 75%, 80%, 85%, 90%, 95%, 96%, 97%, 98%, or 99% homology with amino acids 817-900 (55% of residues in the four Cas9 sequences in FIGS. 2A-2G are conserved) of the amino acid sequence of Cas9 of S. pyogenes, S. thermophilus, S. mutans or L. innocua;

[1135] differs by at least 1, 2, or 5 amino acids but by no more than 35, 30, 25, 20 or 10 amino acids from amino acids 817-900 of the amino acid sequence of Cas9 of S. pyogenes, S. thermophilus, S. mutans or L. innocua; or

[1136] is identical to 817-900 of the amino acid sequence of Cas9 of S. pyogenes, S. thermophilus, S. mutans or L. innocua.

[1137] In an embodiment, a Cas9 molecule or Cas9 polypeptide, e.g., an eaCas9 molecule or eaCas9 polypeptide, comprises an amino acid sequence referred to as region 5:

[1138] having 50%, 55%, 60%, 65%, 70%, 75%, 80%, 85%, 90%, 95%, 96%, 97%, 98%, or 99% homology with amino acids 900-960 (60% of residues in the four Cas9 sequences in FIGS. 2A-2G are conserved) of the amino acid sequence of Cas9 of S. pyogenes, S. thermophilus, S. mutans or L. innocua;

[1139] differs by at least 1, 2, or 5 amino acids but by no more than 35, 30, 25, 20 or 10 amino acids from amino acids 900-960 of the amino acid sequence of Cas9 of S. pyogenes, S. thermophilus, S. mutans or L. innocua; or

[1140] is identical to 900-960 of the amino acid sequence of Cas9 of S. pyogenes, S. thermophilus, S. mutans or L. innocua.

### Modifications of RNA-Guided Nucleases

[1141] The RNA-guided nucleases described above have activities and properties that are useful in a variety of applications, but the skilled artisan will appreciate that RNA-guided nucleases may also be modified in certain instances, to alter cleavage activity, PAM specificity, or other structural or functional features.

[1142] Turning first to modifications that alter cleavage activity, mutations that reduce or eliminate the activity of domains within the NUC lobe have been described above. As discussed in more detail below, exemplary mutations that may be made in the RuvC domains, in the Cas9 HNH domain, or in the Cpf1 Nuc domain are described in Ran and Yamano, as well as in Cotta-Ramusino. In general, mutations that reduce or eliminate activity in one of the two nuclease domains result in RNA-guided nucleases with nickase activity, but it should be noted that the type of nickase activity varies depending on which domain is inactivated. As one example, inactivation of a RuvC domain of a Cas9 will result in a nickase that cleaves the complementary strand, while inactivation of a Cas9 HNH domain results in a nickase that cleaves the non-complementary strand.

[1143] Modifications of PAM specificity relative to naturally occurring Cas9 reference molecules has been described for both S. pyogenes (Kleinstiver 2015a) and S. aureus (Kleinstiver 2015b). Modifications that improve the targeting fidelity of Cas9 have also been described (Kleinstiver 2016). Each of these references is incorporated by reference herein.

[1144] RNA-guided nucleases have been split into two or more parts (see, e.g., Zetsche 2015; Fine 2015; both incorporated by reference).

[1145] RNA-guided nucleases are, in some cases, size-optimized or truncated, for example via one or more deletions that reduce the size of the nuclease while still retaining gRNA association, target and PAM recognition, and cleavage activities. In certain embodiments, RNA guided nucleases are bound, covalently or non-covalently, to another polypeptide, nucleotide, or other structure, optionally by means of a linker. RNA-guided nucleases also optionally include a tag, such as a nuclear localization signal to facilitate movement of RNA-guided nuclease protein into the nucleus.

### Engineered or Altered Cas9 Molecules and Cas9 Polypeptides

[1146] Cas9 molecules and Cas9 polypeptides described herein, e.g., naturally occurring Cas9 molecules, can possess any of a number of properties, including: nickase activity, nuclease activity (e.g., endonuclease and/or exonuclease activity); helicase activity; the ability to associate functionally with a gRNA molecule; and the ability to target (or localize to) a site on a nucleic acid (e.g., PAM recognition and specificity). In an embodiment, a Cas9 molecule or Cas9 polypeptide can include all or a subset of these properties. In typical embodiments, a Cas9 molecule or Cas9 polypeptide has the ability to interact with a gRNA molecule and, in concert with the gRNA molecule, localize to a site in a nucleic acid. Other activities, e.g., PAM specificity, cleavage activity, or helicase activity can vary more widely in Cas9 molecules and Cas9 polypeptides.

[1147] Cas9 molecules include engineered Cas9 molecules and engineered Cas9 polypeptides (engineered, as used in this context, means merely that the Cas9 molecule or Cas9 polypeptide differs from a reference sequences, and implies no process or origin limitation). An engineered Cas9 molecule or Cas9 polypeptide can comprise altered enzymatic properties, e.g., altered nuclease activity, (as compared with a naturally occurring or other reference Cas9 molecule) or altered helicase activity. As discussed herein, an engineered Cas9 molecule or Cas9 polypeptide can have nickase activity (as opposed to double strand nuclease activity). In an embodiment an engineered Cas9 molecule or Cas9 polypeptide can have an alteration that alters its size, e.g., a deletion of amino acid sequence that reduces its size, e.g., without significant effect on one or more, or any Cas9 activity. In an embodiment, an engineered Cas9 molecule or Cas9 polypeptide can comprise an alteration that affects PAM recognition. E.g., an engineered Cas9 molecule can be altered to recognize a PAM sequence other than that recognized by the endogenous wild-type PI domain. In an embodiment, a Cas9 molecule or Cas9 polypeptide can differ in sequence from a naturally occurring Cas9 molecule but not have significant alteration in one or more Cas9 activities.

[1148] Cas9 molecules or Cas9 polypeptides with desired properties can be made in a number of ways, e.g., by alteration of a parental, e.g., naturally occurring, Cas9 molecules or Cas9 polypeptides, to provide an altered Cas9 molecule or Cas9 polypeptide having a desired property. For example, one or more mutations or differences relative to a parental Cas9 molecule, e.g., a naturally occurring or engineered Cas9 molecule, can be introduced. Such mutations and differences comprise: substitutions (e.g., conservative substitutions or substitutions of non-essential amino acids); insertions; or deletions. In an embodiment, a Cas9 molecule or Cas9 polypeptide can comprises one or more mutations or differences, e.g., at least 1, 2, 3, 4, 5, 10, 15, 20, 30, 40 or 50 mutations, but less than 200, 100, or 80 mutations relative to a reference, e.g., a parental, Cas9 molecule.

[1149] In an embodiment, a mutation or mutations do not have a substantial effect on a Cas9 activity, e.g. a Cas9 activity described herein. In an embodiment, a mutation or mutations have a substantial effect on a Cas9 activity, e.g. a Cas9 activity described herein.

### Non-Cleaving and Modified-Cleavage Cas9 Molecules and Cas9 Polypeptides

[1150] In an embodiment, a Cas9 molecule or Cas9 polypeptide comprises a cleavage property that differs from naturally occurring Cas9 molecules, e.g., that differs from the naturally occurring Cas9 molecule having the closest homology. For example, a Cas9 molecule or Cas9 polypeptide can differ from naturally occurring Cas9 molecules, e.g., a Cas9 molecule of S. pyogenes, as follows: its ability to modulate, e.g., decreased or increased, cleavage of a double stranded nucleic acid (endonuclease and/or exonuclease activity), e.g., as compared to a naturally occurring Cas9 molecule (e.g., a Cas9 molecule of S. pyogenes); its ability to modulate, e.g., decreased or increased, cleavage of a single strand of a nucleic acid, e.g., a non-complementary strand of a nucleic acid molecule or a complementary strand of a nucleic acid molecule (nickase activity), e.g., as compared to a naturally occurring Cas9 molecule (e.g., a Cas9 molecule of S. pyogenes); or the ability to cleave a nucleic acid molecule, e.g., a double stranded or single stranded nucleic acid molecule, can be eliminated.

Modified Cleavage eaCas9 Molecules and eaCas9 Polypeptides

[1151] In an embodiment, an eaCas9 molecule or eaCas9 polypeptide comprises one or more of the following activities: cleavage activity associated with an N-terminal RuvC-like domain; cleavage activity associated with an HNH-like domain; cleavage activity associated with an HNH-like domain and cleavage activity associated with an N-terminal RuvC-like domain.

[1152] In an embodiment, an eaCas9 molecule or eaCas9 polypeptide comprises an active, or cleavage competent, HNH-like domain (e.g., an HNH-like domain described herein, e.g., SEQ ID NO: 17, SEQ ID NO: 18, SEQ ID NO: 19, SEQ ID NO: 20, or SEQ ID NO: 21) and an inactive, or cleavage incompetent, N-terminal RuvC-like domain. An exemplary inactive, or cleavage incompetent N-terminal RuvC-like domain can have a mutation of an aspartic acid in an N-terminal RuvC-like domain, e.g., an aspartic acid at position 9 of the consensus sequence disclosed in FIGS. 2A-2G or an aspartic acid at position 10 of SEQ ID NO: 7, e.g., can be substituted with an alanine. In an embodiment, the eaCas9 molecule or eaCas9 polypeptide differs from wild type in the N-terminal RuvC-like domain and does not cleave the target nucleic acid, or cleaves with significantly less efficiency, e.g., less than 20, 10, 5, 1 or 0.1% of the cleavage activity of a reference Cas9 molecule, e.g., as measured by an assay described herein. The reference Cas9 molecule can by a naturally occurring unmodified Cas9 molecule, e.g., a naturally occurring Cas9 molecule such as a Cas9 molecule of S. pyogenes, or S. thermophilus. In an embodiment, the reference Cas9 molecule is the naturally occurring Cas9 molecule having the closest sequence identity or homology.

[1153] In an embodiment, an eaCas9 molecule or eaCas9 polypeptide comprises an inactive, or cleavage incompetent, HNH domain and an active, or cleavage competent, N-terminal RuvC-like domain (e.g., an N-terminal RuvC-like domain described herein, e.g., SEQ ID NO: 8, SEQ ID NO: 9, SEQ ID NO: 10, SEQ ID NO: 11, SEQ ID NO: 12, SEQ ID NO: 13, SEQ ID NO: 14, SEQ ID NO: 15, or SEQ ID NO: 16). Exemplary inactive, or cleavage incompetent HNH-like domains can have a mutation at one or more of: a histidine in an HNH-like domain, e.g., a histidine shown at position 856 of FIGS. 2A-2G, e.g., can be substituted with an alanine; and one or more asparagines in an HNH-like domain, e.g., an asparagine shown at position 870 of FIGS. 2A-2G and/or at position 879 of FIGS. 2A-2G, e.g., can be substituted with an alanine. In an embodiment, the eaCas9 differs from wild type in the HNH-like domain and does not cleave the target nucleic acid, or cleaves with significantly less efficiency, e.g., less than 20, 10, 5, 1 or 0.1% of the cleavage activity of a reference Cas9 molecule, e.g., as measured by an assay described herein. The reference Cas9 molecule can by a naturally occurring unmodified Cas9 molecule, e.g., a naturally occurring Cas9 molecule such as a Cas9 molecule of S. pyogenes, or S. thermophilus. In an embodiment, the reference Cas9 molecule is the naturally occurring Cas9 molecule having the closest sequence identity or homology.

### Alterations in the Ability to Cleave One or Both Strands of a Target Nucleic Acid

[1154] In an embodiment, exemplary Cas9 activities comprise one or more of PAM specificity, cleavage activity, and helicase activity. A mutation(s) can be present, e.g., in one or more RuvC-like domain, e.g., an N-terminal RuvC-like domain; an HNH-like domain; a region outside the RuvC-like domains and the HNH-like domain. In some embodiments, a mutation(s) is present in a RuvC-like domain, e.g., an N-terminal RuvC-like domain. In some embodiments, a mutation(s) is present in an HNH-like domain. In some embodiments, mutations are present in both a RuvC-like domain, e.g., an N-terminal RuvC-like domain, and an HNH-like domain.

[1155] Exemplary mutations that may be made in the RuvC domain or HNH domain with reference to the S. pyogenes sequence include: D10A, E762A, H840A, N854A, N863A and/or D986A.

[1156] In an embodiment, a Cas9 molecule or Cas9 polypeptide is an eiCas9 molecule or eiCas9 polypeptide comprising one or more differences in a RuvC domain and/or in an HNH domain as compared to a reference Cas9 molecule, and the eiCas9 molecule or eiCas9 polypeptide does not cleave a nucleic acid, or cleaves with significantly less efficiency than does wildtype, e.g., when compared with wild type in a cleavage assay, e.g., as described herein, cuts with less than 50, 25, 10, or 1% of a reference Cas9 molecule, as measured by an assay described herein.

[1157] Whether or not a particular sequence, e.g., a substitution, may affect one or more activity, such as targeting activity, cleavage activity, etc., can be evaluated or predicted, e.g., by evaluating whether the mutation is conservative or by the method described in Section V. In an embodiment, a “non-essential” amino acid residue, as used in the context of a Cas9 molecule, is a residue that can be altered from the wild-type sequence of a Cas9 molecule, e.g., a naturally occurring Cas9 molecule, e.g., an eaCas9 molecule, without abolishing or more preferably, without substantially altering a Cas9 activity (e.g., cleavage activity), whereas changing an “essential” amino acid residue results in a substantial loss of activity (e.g., cleavage activity).

[1158] In an embodiment, a Cas9 molecule or Cas9 polypeptide comprises a cleavage property that differs from naturally occurring Cas9 molecules, e.g., that differs from the naturally occurring Cas9 molecule having the closest homology. For example, a Cas9 molecule or Cas9 polypeptide can differ from naturally occurring Cas9 molecules, e.g., a Cas9 molecule of S aureus, S. pyogenes, or C. jejuni as follows: its ability to modulate, e.g., decreased or increased, cleavage of a double stranded break (endonuclease and/or exonuclease activity), e.g., as compared to a naturally occurring Cas9 molecule (e.g., a Cas9 molecule of S aureus, S. pyogenes, or C. jejuni); its ability to modulate, e.g., decreased or increased, cleavage of a single strand of a nucleic acid, e.g., a non-complimentary strand of a nucleic acid molecule or a complementary strand of a nucleic acid molecule (nickase activity), e.g., as compared to a naturally occurring Cas9 molecule (e.g., a Cas9 molecule of S aureus, S. pyogenes, or C. jejuni); or the ability to cleave a nucleic acid molecule, e.g., a double stranded or single stranded nucleic acid molecule, can be eliminated.

[1159] In an embodiment, the altered Cas9 molecule or Cas9 polypeptide is an eaCas9 molecule or eaCas9 polypeptide comprising one or more of the following activities: cleavage activity associated with a RuvC domain; cleavage activity associated with an HNH domain; cleavage activity associated with an HNH domain and cleavage activity associated with a RuvC domain.

[1160] In an embodiment, the altered Cas9 molecule or Cas9 polypeptide is an eiCas9 molecule or eiCas9 polypeptide which does not cleave a nucleic acid molecule (either double stranded or single stranded nucleic acid molecules) or cleaves a nucleic acid molecule with significantly less efficiency, e.g., less than 20, 10, 5, 1 or 0.1% of the cleavage activity of a reference Cas9 molecule, e.g., as measured by an assay described herein. The reference Cas9 molecule can be a naturally occurring unmodified Cas9 molecule, e.g., a naturally occurring Cas9 molecule such as a Cas9 molecule of S. pyogenes, S. thermophilus, S. aureus, C. jejuni or N. meningitidis. In an embodiment, the reference Cas9 molecule is the naturally occurring Cas9 molecule having the closest sequence identity or homology. In an embodiment, the eiCas9 molecule or eiCas9 polypeptide lacks substantial cleavage activity associated with a RuvC domain and cleavage activity associated with an HNH domain.

[1161] In an embodiment, the altered Cas9 molecule or Cas9 polypeptide is an eaCas9 molecule or eaCas9 polypeptide comprising the fixed amino acid residues of S. pyogenes shown in the consensus sequence disclosed in FIGS. 2A-2G, and has one or more amino acids that differ from the amino acid sequence of S. pyogenes (e.g., has a substitution) at one or more residue (e.g., 2, 3, 5, 10, 15, 20, 30, 50, 70, 80, 90, 100, 200 amino acid residues) represented by an “-” in the consensus sequence disclosed in FIGS. 2A-2G or SEQ ID NO: 7.

[1162] In an embodiment, the altered Cas9 molecule or Cas9 polypeptide comprises a sequence in which:

[1163] the sequence corresponding to the fixed sequence of the consensus sequence disclosed in FIGS. 2A-2G differs at no more than 1, 2, 3, 4, 5, 10, 15, or 20% of the fixed residues in the consensus sequence disclosed in FIGS. 2A-2G;

[1164] the sequence corresponding to the residues identified by “*” in the consensus sequence disclosed in FIGS. 2A-2G differ at no more than 1, 2, 3, 4, 5, 10, 15, 20, 25, 30, 35, or 40% of the “*” residues from the corresponding sequence of naturally occurring Cas9 molecule, e.g., an S. pyogenes Cas9 molecule; and,

[1165] the sequence corresponding to the residues identified by “-” in the consensus sequence disclosed in FIGS. 2A-2G differ at no more than 5, 10, 15, 20, 25, 30, 35, 40, 45, 55, or 60% of the “-” residues from the corresponding sequence of naturally occurring Cas9 molecule, e.g., an S. pyogenes Cas9 molecule.

[1166] In an embodiment, the altered Cas9 molecule or Cas9 polypeptide is an eaCas9 molecule or eaCas9 polypeptide comprising the fixed amino acid residues of S. thermophilus shown in the consensus sequence disclosed in FIGS. 2A-2G, and has one or more amino acids that differ from the amino acid sequence of S. thermophilus (e.g., has a substitution) at one or more residue (e.g., 2, 3, 5, 10, 15, 20, 30, 50, 70, 80, 90, 100, 200 amino acid residues) represented by an “-” in the consensus sequence disclosed in FIGS. 2A-2G.

[1167] In an embodiment the altered Cas9 molecule or Cas9 polypeptide comprises a sequence in which:

[1168] the sequence corresponding to the fixed sequence of the consensus sequence disclosed in FIGS. 2A-2G differs at no more than 1, 2, 3, 4, 5, 10, 15, or 20% of the fixed residues in the consensus sequence disclosed in FIGS. 2A-2G;

[1169] the sequence corresponding to the residues identified by “*” in the consensus sequence disclosed in FIGS. 2A-2G differ at no more than 1, 2, 3, 4, 5, 10, 15, 20, 25, 30, 35, or 40% of the “*” residues from the corresponding sequence of naturally occurring Cas9 molecule, e.g., an S. thermophilus Cas9 molecule; and,

[1170] the sequence corresponding to the residues identified by “-” in the consensus sequence disclosed in FIGS. 2A-2G differ at no more than 5, 10, 15, 20, 25, 30, 35, 40, 45, 55, or 60% of the “-” residues from the corresponding sequence of naturally occurring Cas9 molecule, e.g., an S. thermophilus Cas9 molecule.

[1171] In an embodiment, the altered Cas9 molecule or Cas9 polypeptide is an eaCas9 molecule or eaCas9 polypeptide comprising the fixed amino acid residues of S. mutans shown in the consensus sequence disclosed in FIGS. 2A-2G, and has one or more amino acids that differ from the amino acid sequence of S. mutans (e.g., has a substitution) at one or more residue (e.g., 2, 3, 5, 10, 15, 20, 30, 50, 70, 80, 90, 100, 200 amino acid residues) represented by an “-” in the consensus sequence disclosed in FIGS. 2A-2G.

[1172] In an embodiment, the altered Cas9 molecule or Cas9 polypeptide comprises a sequence in which:

[1173] the sequence corresponding to the fixed sequence of the consensus sequence disclosed in FIGS. 2A-2G differs at no more than 1, 2, 3, 4, 5, 10, 15, or 20% of the fixed residues in the consensus sequence disclosed in FIGS. 2A-2G;

[1174] the sequence corresponding to the residues identified by “*” in the consensus sequence disclosed in FIGS. 2A-2G differ at no more than 1, 2, 3, 4, 5, 10, 15, 20, 25, 30, 35, or 40% of the “*” residues from the corresponding sequence of naturally occurring Cas9 molecule, e.g., an S. mutans Cas9 molecule; and,

[1175] the sequence corresponding to the residues identified by “-” in the consensus sequence disclosed in FIGS. 2A-2G differ at no more than 5, 10, 15, 20, 25, 30, 35, 40, 45, 55, or 60% of the “-” residues from the corresponding sequence of naturally occurring Cas9 molecule, e.g., an S. mutans Cas9 molecule.

[1176] In an embodiment, the altered Cas9 molecule or Cas9 polypeptide is an eaCas9 molecule or eaCas9 polypeptide comprising the fixed amino acid residues of L. innocula shown in the consensus sequence disclosed in FIGS. 2A-2G, and has one or more amino acids that differ from the amino acid sequence of L. innocula (e.g., has a substitution) at one or more residue (e.g., 2, 3, 5, 10, 15, 20, 30, 50, 70, 80, 90, 100, 200 amino acid residues) represented by an “-” in the consensus sequence disclosed in FIGS. 2A-2G.

[1177] In an embodiment, the altered Cas9 molecule or Cas9 polypeptide comprises a sequence in which:

[1178] the sequence corresponding to the fixed sequence of the consensus sequence disclosed in FIGS. 2A-2G differs at no more than 1, 2, 3, 4, 5, 10, 15, or 20% of the fixed residues in the consensus sequence disclosed in FIGS. 2A-2G;

[1179] the sequence corresponding to the residues identified by “*” in the consensus sequence disclosed in FIGS. 2A-2G differ at no more than 1, 2, 3, 4, 5, 10, 15, 20, 25, 30, 35, or 40% of the “*” residues from the corresponding sequence of naturally occurring Cas9 molecule, e.g., an L. innocula Cas9 molecule; and,

[1180] the sequence corresponding to the residues identified by “-” in the consensus sequence disclosed in FIGS. 2A-2G differ at no more than 5, 10, 15, 20, 25, 30, 35, 40, 45, 55, or 60% of the “-” residues from the corresponding sequence of naturally occurring Cas9 molecule, e.g., an L. innocula Cas9 molecule.

[1181] In an embodiment, the altered Cas9 molecule or Cas9 polypeptide, e.g., an eaCas9 molecule, can be a fusion, e.g., of two of more different Cas9 molecules or Cas9 polypeptides, e.g., of two or more naturally occurring Cas9 molecules of different species. For example, a fragment of a naturally occurring Cas9 molecule of one species can be fused to a fragment of a Cas9 molecule of a second species. As an example, a fragment of Cas9 molecule of S. pyogenes comprising an N-terminal RuvC-like domain can be fused to a fragment of Cas9 molecule of a species other than S. pyogenes (e.g., S. thermophilus) comprising an HNH-like domain.

Cas9 Molecules and Cas9 Polypeptides with Altered PAM Recognition or No PAM Recognition

[1182] Naturally occurring Cas9 molecules can recognize specific PAM sequences, for example, the PAM recognition sequences described above for S. pyogenes, S. thermophilus, S. mutans, S. aureus and N. meningitidis.

[1183] In an embodiment, a Cas9 molecule or Cas9 polypeptide has the same PAM specificities as a naturally occurring Cas9 molecule. In other embodiments, a Cas9 molecule or Cas9 polypeptide has a PAM specificity not associated with a naturally occurring Cas9 molecule, or a PAM specificity not associated with the naturally occurring Cas9 molecule to which it has the closest sequence homology. For example, a naturally occurring Cas9 molecule can be altered, e.g., to alter PAM recognition, e.g., to alter the PAM sequence that the Cas9 molecule recognizes to decrease off target sites and/or improve specificity; or eliminate a PAM recognition requirement. In an embodiment, a Cas9 molecule or Cas9 polypeptide can be altered, e.g., to increase length of PAM recognition sequence and/or improve Cas9 specificity to high level of identity, e.g., to decrease off target sites and increase specificity. In an embodiment, the length of the PAM recognition sequence is at least 4, 5, 6, 7, 8, 9, 10 or 15 amino acids in length. Cas9 molecules or Cas9 polypeptides that recognize different PAM sequences and/or have reduced off-target activity can be generated using directed evolution. Exemplary methods and systems that can be used for directed evolution of Cas9 molecules are described, e.g., in Esvelt 2011. Candidate Cas9 molecules can be evaluated, e.g., by methods described in Section V.

[1184] Alterations of the PI domain, which mediates PAM recognition, are discussed below.

Synthetic Cas9 Molecules and Cas9 Polypeptides with Altered PI Domains

[1185] Current genome-editing methods are limited in the diversity of target sequences that can be targeted by the PAM sequence that is recognized by the Cas9 molecule utilized. A synthetic Cas9 molecule (or Syn-Cas9 molecule), or synthetic Cas9 polypeptide (or Syn-Cas9 polypeptide), as that term is used herein, refers to a Cas9 molecule or Cas9 polypeptide that comprises a Cas9 core domain from one bacterial species and a functional altered PI domain, i.e., a PI domain other than that naturally associated with the Cas9 core domain, e.g., from a different bacterial species.

[1186] In an embodiment, the altered PI domain recognizes a PAM sequence that is different from the PAM sequence recognized by the naturally-occurring Cas9 from which the Cas9 core domain is derived. In an embodiment, the altered PI domain recognizes the same PAM sequence recognized by the naturally-occurring Cas9 from which the Cas9 core domain is derived, but with different affinity or specificity. A Syn-Cas9 molecule or Syn-Cas9 polypeptide can be, respectively, a Syn-eaCas9 molecule or Syn-eaCas9 polypeptide or a Syn-eiCas9 molecule Syn-eiCas9 polypeptide.

[1187] An exemplary Syn-Cas9 molecule or Syn-Cas9 polypeptide comprises:

[1188] a) a Cas9 core domain, e.g., a Cas9 core domain from Table 12 or 13, e.g., a S. aureus, S. pyogenes, or C. jejuni Cas9 core domain; and

[1189] b) an altered PI domain from a species X Cas9 sequence selected from Tables 15 and 16.

[1190] In an embodiment, the RKR motif (the PAM binding motif) of said altered PI domain comprises: differences at 1, 2, or 3 amino acid residues; a difference in amino acid sequence at the first, second, or third position; differences in amino acid sequence at the first and second positions, the first and third positions, or the second and third positions; as compared with the sequence of the RKR motif of the native or endogenous PI domain associated with the Cas9 core domain.

[1191] In an embodiment, the Cas9 core domain comprises the Cas9 core domain from a species X Cas9 from Table 12 and said altered PI domain comprises a PI domain from a species Y Cas9 from Table 12.

[1192] In an embodiment, the RKR motif of the species X Cas9 is other than the RKR motif of the species Y Cas9.

[1193] In an embodiment, the RKR motif of the altered PI domain is selected from XXY, XNG, and XNQ.

[1194] In an embodiment, the altered PI domain has at least 60, 70, 80, 90, 95, or 100% homology with the amino acid sequence of a naturally occurring PI domain of said species Y from Table 12.

[1195] In an embodiment, the altered PI domain differs by no more than 50, 40, 30, 25, 20, 15, 10, 5, 4, 3, 2, or 1 amino acid residue from the amino acid sequence of a naturally occurring PI domain of said second species from Table 12.

[1196] In an embodiment, the Cas9 core domain comprises a S. aureus core domain and altered PI domain comprises: an A. denitrificans PI domain; a C. jejuni PI domain; a H. mustelae PI domain; or an altered PI domain of species X PI domain, wherein species X is selected from Table 16.

[1197] In an embodiment, the Cas9 core domain comprises a S. pyogenes core domain and the altered PI domain comprises: an A. denitrificans PI domain; a C. jejuni PI domain; a H. mustelae PI domain; or an altered PI domain of species X PI domain, wherein species X is selected from Table 16.

[1198] In an embodiment, the Cas9 core domain comprises a C. jejuni core domain and the altered PI domain comprises: an A. denitrificans PI domain; a H. mustelae PI domain; or an altered PI domain of species X PI domain, wherein species X is selected from Table 16.

[1199] In an embodiment, the Cas9 molecule or Cas9 polypeptide further comprises a linker disposed between said Cas9 core domain and said altered PI domain.

[1200] In an embodiment, the linker comprises: a linker described elsewhere herein disposed between the Cas9 core domain and the heterologous PI domain. Suitable linkers are further described in Section VI.

[1201] Exemplary altered PI domains for use in Syn-Cas9 molecules are described in Tables 15 and 16. The sequences for the 83 Cas9 orthologs referenced in Tables 15 and 16 are provided in Table 12. Table 14 provides the Cas9 orthologs with known PAM sequences and the corresponding RKR motif.

[1202] In an embodiment, a Syn-Cas9 molecule or Syn-Cas9 polypeptide may also be size-optimized, e.g., the Syn-Cas9 molecule or Syn-Cas9 polypeptide comprises one or more deletions, and optionally one or more linkers disposed between the amino acid residues flanking the deletions. In an embodiment, a Syn-Cas9 molecule or Syn-Cas9 polypeptide comprises a REC deletion.

### Size-Optimized Cas9 Molecules and Cas9 Polypeptides

[1203] Engineered Cas9 molecules and engineered Cas9 polypeptides described herein include a Cas9 molecule or Cas9 polypeptide comprising a deletion that reduces the size of the molecule while still retaining desired Cas9 properties, e.g., essentially native conformation, Cas9 nuclease activity, and/or target nucleic acid molecule recognition. Provided herein are Cas9 molecules or Cas9 polypeptides comprising one or more deletions and optionally one or more linkers, wherein a linker is disposed between the amino acid residues that flank the deletion. Methods for identifying suitable deletions in a reference Cas9 molecule, methods for generating Cas9 molecules with a deletion and a linker, and methods for using such Cas9 molecules will be apparent to one of ordinary skill in the art upon review of this document.

[1204] A Cas9 molecule, e.g., a S. aureus, S. pyogenes, or C. jejuni, Cas9 molecule, having a deletion is smaller, e.g., has reduced number of amino acids, than the corresponding naturally-occurring Cas9 molecule. The smaller size of the Cas9 molecules allows increased flexibility for delivery methods, and thereby increases utility for genome-editing. A Cas9 molecule or Cas9 polypeptide can comprise one or more deletions that do not substantially affect or decrease the activity of the resultant Cas9 molecules or Cas9 polypeptides described herein. Activities that are retained in the Cas9 molecules or Cas9 polypeptides comprising a deletion as described herein include one or more of the following:

[1205] a nickase activity, i.e., the ability to cleave a single strand, e.g., the non-complementary strand or the complementary strand, of a nucleic acid molecule; a double stranded nuclease activity, i.e., the ability to cleave both strands of a double stranded nucleic acid and create a double stranded break, which in an embodiment is the presence of two nickase activities;

[1206] an endonuclease activity;

[1207] an exonuclease activity;

[1208] a helicase activity, i.e., the ability to unwind the helical structure of a double stranded nucleic acid;

[1209] and recognition activity of a nucleic acid molecule, e.g., a target nucleic acid or a gRNA.

[1210] Activity of the Cas9 molecules or Cas9 polypeptides described herein can be assessed using the activity assays described herein or in the art.

### Identifying Regions Suitable for Deletion

[1211] Suitable regions of Cas9 molecules for deletion can be identified by a variety of methods. Naturally-occurring orthologous Cas9 molecules from various bacterial species, e.g., any one of those listed in Table 12, can be modeled onto the crystal structure of S. pyogenes Cas9 (Nishimasu 2014) to examine the level of conservation across the selected Cas9 orthologs with respect to the three-dimensional conformation of the protein. Less conserved or unconserved regions that are spatially located distant from regions involved in Cas9 activity, e.g., interface with the target nucleic acid molecule and/or gRNA, represent regions or domains are candidates for deletion without substantially affecting or decreasing Cas9 activity.

### REC-Optimized Cas9 Molecules and Cas9 Polypeptides

[1212] A REC-optimized Cas9 molecule, or a REC-optimized Cas9 polypeptide, as that term is used herein, refers to a Cas9 molecule or Cas9 polypeptide that comprises a deletion in one or both of the REC2 domain and the RE1_{CT} domain (collectively a REC deletion), wherein the deletion comprises at least 10% of the amino acid residues in the cognate domain. A REC-optimized Cas9 molecule or Cas9 polypeptide can be an eaCas9 molecule or eaCas9 polypeptide, or an eiCas9 molecule or eiCas9 polypeptide. An exemplary REC-optimized Cas9 molecule or REC-optimized Cas9 polypeptide comprises:

[1213] a) a deletion selected from:
[1214] i) a REC2 deletion;
[1215] ii) a REC1_{CT} deletion; or
[1216] iii) a REC1_{SUB} deletion.

[1217] Optionally, a linker is disposed between the amino acid residues that flank the deletion.

[1218] In an embodiment, a Cas9 molecule or Cas9 polypeptide includes only one deletion, or only two deletions. A Cas9 molecule or Cas9 polypeptide can comprise a REC2 deletion and a REC1_{CT} deletion. A Cas9 molecule or Cas9 polypeptide can comprise a REC2 deletion and a REC1_{SUB} deletion.

[1219] Generally, the deletion will contain at least 10% of the amino acids in the cognate domain, e.g., a REC2 deletion will include at least 10% of the amino acids in the REC2 domain.

[1220] A deletion can comprise: at least 10, 20, 30, 40, 50, 60, 70, 80, or 90% of the amino acid residues of its cognate domain; all of the amino acid residues of its cognate domain; an amino acid residue outside its cognate domain; a plurality of amino acid residues outside its cognate domain; the amino acid residue immediately N terminal to its cognate domain; the amino acid residue immediately C terminal to its cognate domain; the amino acid residue immediately N terminal to its cognate and the amino acid residue immediately C terminal to its cognate domain; a plurality of, e.g., up to 5, 10, 15, or 20, amino acid residues N terminal to its cognate domain; a plurality of, e.g., up to 5, 10, 15, or 20, amino acid residues C terminal to its cognate domain; a plurality of, e.g., up to 5, 10, 15, or 20, amino acid residues N terminal to its cognate domain and a plurality of e.g., up to 5, 10, 15, or 20, amino acid residues C terminal to its cognate domain.

[1221] In an embodiment, a deletion does not extend beyond: its cognate domain; the N terminal amino acid residue of its cognate domain; the C terminal amino acid residue of its cognate domain.

[1222] A REC-optimized Cas9 molecule or REC-optimized Cas9 polypeptide can include a linker disposed between the amino acid residues that flank the deletion. Suitable linkers for use between the amino acid resides that flank a REC deletion in a REC-optimized Cas9 molecule or REC-optimized Cas9 polypeptide is disclosed in Section VI.

[1223] In an embodiment, a REC-optimized Cas9 molecule or REC-optimized Cas9 polypeptide comprises an amino acid sequence that, other than any REC deletion and associated linker, has at least 50, 55, 60, 65, 70, 75, 80, 85, 90, 95, 99, or 100% homology with the amino acid sequence of a naturally occurring Cas 9, e.g., a Cas9 molecule described in Table 12, e.g., a S. aureus Cas9 molecule, a S. pyogenes Cas9 molecule, or a C. jejuni Cas9 molecule.

[1224] In an embodiment, a REC-optimized Cas9 molecule or REC-optimized Cas9 polypeptide comprises an amino acid sequence that, other than any REC deletion and associated linker, differs by no more than 1, 2, 3, 4, 5, 6, 7, 8, 9, 10, 15, 20, or 25, amino acid residues from the amino acid sequence of a naturally occurring Cas 9, e.g., a Cas9 molecule described in Table 12, e.g., a S. aureus Cas9 molecule, a S. pyogenes Cas9 molecule, or a C. jejuni Cas9 molecule.

[1225] In an embodiment, a REC-optimized Cas9 molecule or REC-optimized Cas9 polypeptide comprises an amino acid sequence that, other than any REC deletion and associate linker, differs by no more than 1, 2, 3, 4, 5, 6, 7, 8, 9, 10, 15, 20, or 25% of the, amino acid residues from the amino acid sequence of a naturally occurring Cas 9, e.g., a Cas9 molecule described in Table 12, e.g., a S. aureus Cas9 molecule, a S. pyogenes Cas9 molecule, or a C. jejuni Cas9 molecule.

[1226] For sequence comparison, typically one sequence acts as a reference sequence, to which test sequences are compared. When using a sequence comparison algorithm, test and reference sequences are entered into a computer, subsequence coordinates are designated, if necessary, and sequence algorithm program parameters are designated. Default program parameters can be used, or alternative parameters can be designated. The sequence comparison algorithm then calculates the percent sequence identities for the test sequences relative to the reference sequence, based on the program parameters. Methods of alignment of sequences for comparison are well known in the art. Optimal alignment of sequences for comparison can be conducted, e.g., by the local homology algorithm of Smith & Waterman 1981, by the homology alignment algorithm of Needleman & Wunsch 1970, by the search for similarity method of Pearson & Lipman 1988, by computerized implementations of these algorithms (GAP, BESTFIT, FASTA, and TFASTA in the Wisconsin Genetics Software Package, Genetics Computer Group, 575 Science Dr., Madison, Wis.), or by manual alignment and visual inspection (see, e.g., Brent et al., Current Protocols in Molecular Biology, John Wiley & Sons, Inc. (2003)).

[1227] Two examples of algorithms that are suitable for determining percent sequence identity and sequence similarity are the BLAST and BLAST 2.0 algorithms, which are described in Altschul 1977 and Altschul 1990), respectively. Software for performing BLAST analyses is publicly available through the National Center for Biotechnology Information.

[1228] The percent identity between two amino acid sequences can also be determined using the algorithm of Myers 1988, which has been incorporated into the ALIGN program (version 2.0), using a PAM120 weight residue table, a gap length penalty of 12 and a gap penalty of 4. In addition, the percent identity between two amino acid sequences can be determined using the Needleman & Wunsch 1970 algorithm, which has been incorporated into the GAP program in the GCG software package (available at www.gcg.com), using either a Blossom 62 matrix or a PAM250 matrix, and a gap weight of 16, 14, 12, 10, 8, 6, or 4 and a length weight of 1, 2, 3, 4, 5, or 6.

[1229] Sequence information for exemplary REC deletions are provided for 83 naturally-occurring Cas9 orthologs in Table 12. The amino acid sequences of exemplary Cas9 molecules from different bacterial species are shown below.

TABLE 12
Amino Acid Sequence of Cas9 Orthologs

| | | REC2 | | | REC1_{CT} | | | Rec_{sub} | | |
|---|---|---|---|---|---|---|---|---|---|---|
| | | start | stop | # AA | start | stop | # AA | start | stop | # AA |
| | Amino acid | (AA | (AA | deleted | (AA | (AA | deleted | (AA | (AA | deleted |
| Species/Composite ID | sequence | pos) | pos) | (n) | pos) | pos) | (n) | pos) | pos) | (n) |
| Staphylococcus aureus | SEQ ID NO: | 126 | 166 | 41 | 296 | 352 | 57 | 296 | 352 | 57 |
| tr\|J7RUA5\|J7RUA5_STA | 26 | | | | | | | | | |
| AU | | | | | | | | | | |
| Streptococcus pyogenes | SEQ ID NO: | 176 | 314 | 139 | 511 | 592 | 82 | 511 | 592 | 82 |
| sp\|Q99ZW2\|CAS9_STRP | 2 | | | | | | | | | |
| 1 | | | | | | | | | | |
| Campylobacter jejuni | SEQ ID NO: | 137 | 181 | 45 | 316 | 360 | 45 | 316 | 360 | 45 |
| NCTC 11168 | 306 | | | | | | | | | |
| gi\|218563121\|ref\|YP_002 | | | | | | | | | | |
| 344900.1 | | | | | | | | | | |
| Bacteroides fragilis | SEQ ID NO: | 148 | 339 | 192 | 524 | 617 | 84 | 524 | 617 | 84 |
| NCTC 9343 | 307 | | | | | | | | | |
| gi\|60683389\|ref\|YP_2135 | | | | | | | | | | |
| 33.1\| | | | | | | | | | | |
| Bifidobacterium bifidum | SEQ ID NO: | 173 | 335 | 163 | 516 | 607 | 87 | 516 | 607 | 87 |
| S17 | 308 | | | | | | | | | |
| gi\|310286728\|ref\|YP_003 | | | | | | | | | | |
| 937986. | | | | | | | | | | |
| Veillonella atypica ACS- | SEQ ID NO: | 185 | 339 | 155 | 574 | 663 | 79 | 574 | 663 | 79 |
| 134-V-Col7a | 309 | | | | | | | | | |
| gi\|303229466\|ref\|ZP_073 | | | | | | | | | | |
| 16256.1 | | | | | | | | | | |
| Lactobacillus rhamnosus | SEQ ID NO: | 169 | 320 | 152 | 559 | 645 | 78 | 559 | 645 | 78 |
| GG | 310 | | | | | | | | | |
| gi\|258509199\|ref\|YP_003 | | | | | | | | | | |
| 171950.1 | | | | | | | | | | |
| Filifactor alocis ATCC | SEQ ID NO: | 166 | 314 | 149 | 508 | 592 | 76 | 508 | 592 | 76 |
| 35896 | 311 | | | | | | | | | |
| gi\|374307738\|ref\|YP_005 | | | | | | | | | | |
| 054169.1 | | | | | | | | | | |
| Oenococcus kitaharae | SEQ ID NO: | 169 | 317 | 149 | 555 | 639 | 80 | 555 | 639 | 80 |
| DSM 17330 | 312 | | | | | | | | | |
| gi\|366983953\|gb\|EHN593 | | | | | | | | | | |
| 52.1\| | | | | | | | | | | |
| Fructobacillus fructosus | SEQ ID NO: | 168 | 314 | 147 | 488 | 571 | 76 | 488 | 571 | 76 |
| KCTC 3544 | 313 | | | | | | | | | |
| gi\|339625081\|ref\|ZP_086 | | | | | | | | | | |
| 60870.1 | | | | | | | | | | |
| Catenibacterium | SEQ ID NO: | 173 | 318 | 146 | 511 | 594 | 78 | 511 | 594 | 78 |
| mitsuokai DSM 15897 | 314 | | | | | | | | | |
| gi\|224543312\|ref\|ZP_036 | | | | | | | | | | |
| 83851.1 | | | | | | | | | | |
| Finegoldia magna ATCC | SEQ ID NO: | 168 | 313 | 146 | 452 | 534 | 77 | 452 | 534 | 77 |
| 29328 | 315 | | | | | | | | | |
| gi\|169823755\|ref\|YP_001 | | | | | | | | | | |
| 691366.1 | | | | | | | | | | |
| Coriobacterium | SEQ ID NO: | 175 | 318 | 144 | 511 | 592 | 82 | 511 | 592 | 82 |
| glomerans PW2 | 316 | | | | | | | | | |
| gi\|328956315\|ref\|YP_004 | | | | | | | | | | |
| 373648.1 | | | | | | | | | | |
| Eubacterium yurii ATCC | SEQ ID NO: | 169 | 310 | 142 | 552 | 633 | 76 | 552 | 633 | 76 |
| 43715 | 317 | | | | | | | | | |
| gi\|306821691\|ref\|ZP_074 | | | | | | | | | | |
| 55288.1 | | | | | | | | | | |
| Peptoniphilus duerdenii | SEQ ID NO: | 171 | 311 | 141 | 535 | 615 | 76 | 535 | 615 | 76 |
| ATCC BAA-1640 | 318 | | | | | | | | | |
| gi\|304438954\|ref\|ZP_073 | | | | | | | | | | |
| 98877.1 | | | | | | | | | | |
| Acidaminococcus sp. D21 | SEQ ID NO: | 167 | 306 | 140 | 511 | 591 | 75 | 511 | 591 | 75 |
| gi\|227824983\|ref\|ZP_039 | 319 | | | | | | | | | |
| 89815.1 | | | | | | | | | | |
| Lactobacillus farciminis | SEQ ID NO: | 171 | 310 | 140 | 542 | 621 | 85 | 542 | 621 | 85 |
| KCTC 3681 | 320 | | | | | | | | | |
| gi\|336394882\|ref\|ZP_085 | | | | | | | | | | |
| 76281.1 | | | | | | | | | | |
| Streptococcus sanguinis | SEQ ID NO: | 185 | 324 | 140 | 411 | 490 | 85 | 411 | 490 | 85 |
| SK49 | 321 | | | | | | | | | |
| gi\|422884106\|ref\|ZP_169 | | | | | | | | | | |
| 30555.1 | | | | | | | | | | |
| Coprococcus catus GD-7 | SEQ ID NO: | 172 | 310 | 139 | 556 | 634 | 76 | 556 | 634 | 76 |
| gi\|291520705\|emb\|CBK7 | 322 | | | | | | | | | |
| 8998.1\| | | | | | | | | | | |
| Streptococcus mutans | SEQ ID NO: | 176 | 314 | 139 | 392 | 470 | 84 | 392 | 470 | 84 |
| UA159 | 1 | | | | | | | | | |
| gi\|24379809\|ref\|NP_7217 | | | | | | | | | | |
| 64.1\| | | | | | | | | | | |
| Streptococcus pyogenes | SEQ ID NO: | 176 | 314 | 139 | 523 | 600 | 82 | 523 | 600 | 82 |
| M1 GAS | 2 | | | | | | | | | |
| gi\|13622193\|gb\|AAK339 | | | | | | | | | | |
| 36.1\| | | | | | | | | | | |
| Streptococcus | SEQ ID NO: | 176 | 314 | 139 | 481 | 558 | 81 | 481 | 558 | 81 |
| thermophilus LMD-9 | 3 | | | | | | | | | |
| gi\|116628213\|ref\|YP_820 | | | | | | | | | | |
| 832.1\| | | | | | | | | | | |
| Fusobacterium nucleatum | SEQ ID NO: | 171 | 308 | 138 | 537 | 614 | 76 | 537 | 614 | 76 |
| ATCC 49256 | 326 | | | | | | | | | |
| gi\|34762592\|ref\|ZP_0014 | | | | | | | | | | |
| 3587.1\| | | | | | | | | | | |
| Planococcus antarcticus | SEQ ID NO: | 162 | 299 | 138 | 538 | 614 | 94 | 538 | 614 | 94 |
| DSM 14505 | 327 | | | | | | | | | |
| gi\|389815359\|ref\|ZP_102 | | | | | | | | | | |
| 06685.1 | | | | | | | | | | |
| Treponema denticola | SEQ ID NO: | 169 | 305 | 137 | 524 | 600 | 81 | 524 | 600 | 81 |
| ATCC 35405 | 328 | | | | | | | | | |
| gi\|42525843\|ref\|NP_9709 | | | | | | | | | | |
| 41.1\| | | | | | | | | | | |
| Solobacterium moorei | SEQ ID NO: | 179 | 314 | 136 | 544 | 619 | 77 | 544 | 619 | 77 |
| F0204 | 329 | | | | | | | | | |
| gi\|320528778\|ref\|ZP_080 | | | | | | | | | | |
| 29929.1 | | | | | | | | | | |
| Staphylococcus | SEQ ID NO: | 164 | 299 | 136 | 531 | 606 | 92 | 531 | 606 | 92 |
| pseudintermedius ED99 | 330 | | | | | | | | | |
| gi\|323463801\|gb\|ADX75 | | | | | | | | | | |
| 954.1\| | | | | | | | | | | |
| Flavobacterium | SEQ ID NO: | 162 | 286 | 125 | 538 | 613 | 63 | 538 | 613 | 63 |
| branchiophilum FL-15 | 331 | | | | | | | | | |
| gi\|347536497\|ref\|YP_004 | | | | | | | | | | |
| 843922.1 | | | | | | | | | | |
| Ignavibacterium album | SEQ ID NO: | 223 | 329 | 107 | 357 | 432 | 90 | 357 | 432 | 90 |
| JCM 16511 | 332 | | | | | | | | | |
| gi\|385811609\|ref\|YP_005 | | | | | | | | | | |
| 848005.1 | | | | | | | | | | |
| Bergeyella zoohelcum | SEQ ID NO: | 165 | 261 | 97 | 529 | 604 | 56 | 529 | 604 | 56 |
| ATCC 43767 | 333 | | | | | | | | | |
| gi\|423317190\|ref\|ZP_172 | | | | | | | | | | |
| 95095.1 | | | | | | | | | | |
| Nitrobacter hamburgensis | SEQ ID NO: | 169 | 253 | 85 | 536 | 611 | 48 | 536 | 611 | 48 |
| X14 | 334 | | | | | | | | | |
| gi\|92109262\|ref\|YP_5715 | | | | | | | | | | |
| 50.1\| | | | | | | | | | | |
| Odoribacter laneus YIT | SEQ ID NO: | 164 | 242 | 79 | 535 | 610 | 63 | 535 | 610 | 63 |
| 12061 | 335 | | | | | | | | | |
| gi\|374384763\|ref\|ZP_096 | | | | | | | | | | |
| 42280.1 | | | | | | | | | | |
| Legionella pneumophila | SEQ ID NO: | 164 | 239 | 76 | 402 | 476 | 67 | 402 | 476 | 67 |
| str. Paris | 336 | | | | | | | | | |
| gi\|54296138\|ref\|YP_1225 | | | | | | | | | | |
| 07.1\| | | | | | | | | | | |
| Bacteroides sp. 20_3 | SEQ ID NO: | 198 | 269 | 72 | 530 | 604 | 83 | 530 | 604 | 83 |
| gi\|301311869\|ref\|ZP_072 | 337 | | | | | | | | | |
| 17791.1 | | | | | | | | | | |
| Akkermansia muciniphila | SEQ ID NO: | 136 | 202 | 67 | 348 | 418 | 62 | 348 | 418 | 62 |
| ATCC BAA-835 | 338 | | | | | | | | | |
| gi\|187736489\|ref\|YP_001 | | | | | | | | | | |
| 878601. | | | | | | | | | | |
| Prevotella sp. C561 | SEQ ID NO: | 184 | 250 | 67 | 357 | 425 | 78 | 357 | 425 | 78 |
| gi\|345885718\|ref\|ZP_088 | 339 | | | | | | | | | |
| 37074.1 | | | | | | | | | | |
| Wolinella succinogenes | SEQ ID NO: | 157 | 218 | 36 | 401 | 468 | 60 | 401 | 468 | 60 |
| DSM 1740 | 340 | | | | | | | | | |
| gi\|34557932\|ref\|NP_9077 | | | | | | | | | | |
| 47.1\| | | | | | | | | | | |
| Alicyclobacillus | SEQ ID NO: | 142 | 196 | 55 | 416 | 482 | 61 | 416 | 482 | 61 |
| hesperidum URH17-3-68 | 341 | | | | | | | | | |
| gi\|403744858\|ref\|ZP_109 | | | | | | | | | | |
| 53934.1 | | | | | | | | | | |
| Caenispirillum salinarum | SEQ ID NO: | 161 | 214 | 54 | 330 | 393 | 68 | 330 | 393 | 68 |
| AK4 | 342 | | | | | | | | | |
| gi\|427429481\|ref\|ZP_189 | | | | | | | | | | |
| 19511.1 | | | | | | | | | | |
| Eubacterium rectale | SEQ ID NO: | 133 | 185 | 53 | 322 | 384 | 60 | 322 | 384 | 60 |
| ATCC 33656 | 343 | | | | | | | | | |
| gi\|238924075\|ref\|YP_002 | | | | | | | | | | |
| 937591.1 | | | | | | | | | | |
| Mycoplasma synoviae 53 | SEQ ID NO: | 187 | 239 | 53 | 319 | 381 | 80 | 319 | 381 | 80 |
| gi\|71894592\|ref\|YP_2787 | 344 | | | | | | | | | |
| 00.1\| | | | | | | | | | | |
| Porphyromonas sp. oral | SEQ ID NO: | 150 | 202 | 53 | 309 | 371 | 60 | 309 | 371 | 60 |
| taxon 279 str. F0450 | 345 | | | | | | | | | |
| gi\|402847315\|ref\|ZP_108 | | | | | | | | | | |
| 95610.1 | | | | | | | | | | |
| Streptococcus | SEQ ID NO: | 127 | 178 | 139 | 424 | 486 | 81 | 424 | 486 | 81 |
| thermophilus LMD-9 | 346 | | | | | | | | | |
| gi\|116627542\|ref\|YP_820 | | | | | | | | | | |
| 161.1\| | | | | | | | | | | |
| Roseburia inulinivorans | SEQ ID NO: | 154 | 204 | 51 | 318 | 380 | 69 | 318 | 380 | 69 |
| DSM 16841 | 347 | | | | | | | | | |
| gi\|225377804\|ref\|ZP_037 | | | | | | | | | | |
| 55025.1 | | | | | | | | | | |
| Methylosinus | SEQ ID NO: | 144 | 193 | 50 | 426 | 488 | 64 | 426 | 488 | 64 |
| trichosporium OB3b | 348 | | | | | | | | | |
| gi\|296446027\|ref\|ZP_068 | | | | | | | | | | |
| 87976.1 | | | | | | | | | | |
| Ruminococcus albus 8 | SEQ ID NO: | 139 | 187 | 49 | 351 | 412 | 55 | 351 | 412 | 55 |
| gi\|325677756\|ref\|ZP_081 | 349 | | | | | | | | | |
| 57403.1 | | | | | | | | | | |
| Bifidobacterium longum | SEQ ID NO: | 183 | 230 | 48 | 370 | 431 | 44 | 370 | 431 | 44 |
| DJO10A | 350 | | | | | | | | | |
| gi\|189440764\|ref\|YP_001 | | | | | | | | | | |
| 955845. | | | | | | | | | | |
| Enterococcus faecalis | SEQ ID NO: | 123 | 170 | 48 | 327 | 387 | 60 | 327 | 387 | 60 |
| TX0012 | 351 | | | | | | | | | |
| gi\|315149830\|gb\|EFT938 | | | | | | | | | | |
| 46.1\| | | | | | | | | | | |
| Mycoplasma mobile | SEQ ID NO: | 179 | 226 | 48 | 314 | 374 | 79 | 314 | 374 | 79 |
| 163K | 352 | | | | | | | | | |
| gi\|47458868\|ref\|YP_0157 | | | | | | | | | | |
| 30.1\| | | | | | | | | | | |
| Actinomyces coleocanis | SEQ ID NO: | 147 | 193 | 47 | 358 | 418 | 40 | 358 | 418 | 40 |
| DSM 15436 | 353 | | | | | | | | | |
| gi\|227494853\|ref\|ZP_039 | | | | | | | | | | |
| 25169.1 | | | | | | | | | | |
| Dinoroseobacter shibae | SEQ ID NO: | 138 | 184 | 47 | 338 | 398 | 48 | 338 | 398 | 48 |
| DFL 12 | 354 | | | | | | | | | |
| gi\|159042956\|ref\|YP_001 | | | | | | | | | | |
| 531750.1 | | | | | | | | | | |
| Actinomyces sp. oral | SEQ ID NO: | 183 | 228 | 46 | 349 | 409 | 40 | 349 | 409 | 40 |
| taxon 180 str. F0310 | 355 | | | | | | | | | |
| gi\|315605738\|ref\|ZP_078 | | | | | | | | | | |
| 80770.1 | | | | | | | | | | |
| Alcanivorax sp. W11-5 | SEQ ID NO: | 139 | 183 | 45 | 344 | 404 | 61 | 344 | 404 | 61 |
| gi\|407803669\|ref\|ZP_111 | 356 | | | | | | | | | |
| 50502.1 | | | | | | | | | | |
| Aminomonas paucivorans | SEQ ID NO: | 134 | 178 | 45 | 341 | 401 | 63 | 341 | 401 | 63 |
| DSM 12260 | 357 | | | | | | | | | |
| gi\|312879015\|ref\|ZP_077 | | | | | | | | | | |
| 38815.1 | | | | | | | | | | |
| Mycoplasma canis PG 14 | SEQ ID NO: | 139 | 183 | 45 | 319 | 379 | 76 | 319 | 379 | 76 |
| gi\|384393286\|gb\|EIE3973 | 358 | | | | | | | | | |
| 6.1\| | | | | | | | | | | |
| Lactobacillus | SEQ ID NO: | 141 | 184 | 44 | 328 | 387 | 61 | 328 | 387 | 61 |
| coryniformis KCTC 3535 | 359 | | | | | | | | | |
| gi\|336393381\|ref\|ZP_085 | | | | | | | | | | |
| 74780.1 | | | | | | | | | | |
| Elusimicrobium minutum | SEQ ID NO: | 177 | 219 | 43 | 322 | 381 | 47 | 322 | 381 | 47 |
| Pei191 | 360 | | | | | | | | | |
| gi\|187250660\|ref\|YP_001 | | | | | | | | | | |
| 875142.1 | | | | | | | | | | |
| Neisseria meningitidis | SEQ ID NO: | 147 | 189 | 43 | 360 | 419 | 61 | 360 | 419 | 61 |
| Z2491 | 25 | | | | | | | | | |
| gi\|218767588\|ref\|YP_002 | | | | | | | | | | |
| 342100.1 | | | | | | | | | | |
| Pasteurella multocida str. | SEQ ID NO: | 139 | 181 | 43 | 319 | 378 | 61 | 319 | 378 | 61 |
| Pm70 | 362 | | | | | | | | | |
| gi\|15602992\|ref\|NP_2460 | | | | | | | | | | |
| 64.1\| | | | | | | | | | | |
| Rhodovulum sp. PH10 | SEQ ID NO: | 141 | 183 | 43 | 319 | 378 | 48 | 319 | 378 | 48 |
| gi\|402849997\|ref\|ZP_108 | 363 | | | | | | | | | |
| 98214.1 | | | | | | | | | | |
| Eubacterium dolichum | SEQ ID NO: | 131 | 172 | 42 | 303 | 361 | 59 | 303 | 361 | 59 |
| DSM 3991 | 364 | | | | | | | | | |
| gi\|160915782\|ref\|ZP_020 | | | | | | | | | | |
| 77990.1 | | | | | | | | | | |
| Nitratifractor salsuginis | SEQ ID NO: | 143 | 184 | 42 | 347 | 404 | 61 | 347 | 404 | 61 |
| DSM 16511 | 365 | | | | | | | | | |
| gi\|319957206\|ref\|YP_004 | | | | | | | | | | |
| 168469.1 | | | | | | | | | | |
| Rhodospirillum rubrum | SEQ ID NO: | 139 | 180 | 42 | 314 | 371 | 55 | 314 | 371 | 55 |
| ATCC 11170 | 366 | | | | | | | | | |
| gi\|83591793\|ref\|YP_4255 | | | | | | | | | | |
| 45.1\| | | | | | | | | | | |
| Clostridium | SEQ ID NO: | 137 | 176 | 40 | 320 | 376 | 61 | 320 | 376 | 61 |
| cellulolyticum H10 | 367 | | | | | | | | | |
| gi\|220930482\|ref\|YP_002 | | | | | | | | | | |
| 507391.1 | | | | | | | | | | |
| Helicobacter mustelae | SEQ ID NO: | 148 | 187 | 40 | 298 | 354 | 48 | 298 | 354 | 48 |
| 12198 | 368 | | | | | | | | | |
| gi\|291276265\|ref\|YP_003 | | | | | | | | | | |
| 516037.1 | | | | | | | | | | |
| Ilyobacter polytropus | SEQ ID NO: | 134 | 173 | 40 | 462 | 517 | 63 | 462 | 517 | 63 |
| DSM 2926 | 369 | | | | | | | | | |
| gi\|310780384\|ref\|YP_003 | | | | | | | | | | |
| 968716.1 | | | | | | | | | | |
| Sphaerochaeta globus str. | SEQ ID NO: | 163 | 202 | 40 | 335 | 389 | 45 | 335 | 389 | 45 |
| Buddy | 370 | | | | | | | | | |
| gi\|325972003\|ref\|YP_004 | | | | | | | | | | |
| 248194.1 | | | | | | | | | | |
| Staphylococcus | SEQ ID NO: | 128 | 167 | 40 | 337 | 391 | 57 | 337 | 391 | 57 |
| lugdunensis M23590 | 371 | | | | | | | | | |
| gi\|315659848\|ref\|ZP_079 | | | | | | | | | | |
| 12707.1 | | | | | | | | | | |
| Treponema sp. JC4 | SEQ ID NO: | 144 | 183 | 40 | 328 | 382 | 63 | 328 | 382 | 63 |
| gi\|384109266\|ref\|ZP_100 | 372 | | | | | | | | | |
| 10146.1 | | | | | | | | | | |
| Uncultured | SEQ ID NO: | 154 | 193 | 40 | 313 | 365 | 55 | 313 | 365 | 55 |
| Deltaproteobacterium | 373 | | | | | | | | | |
| HF0070 07E19 | | | | | | | | | | |
| gi\|297182908\|gb\|ADI190 | | | | | | | | | | |
| 58.1\| | | | | | | | | | | |
| Alicycliphilus | SEQ ID NO: | 140 | 178 | 39 | 317 | 366 | 48 | 317 | 366 | 48 |
| denitrificans K601 | 374 | | | | | | | | | |
| gi\|330822845\|ref\|YP_004 | | | | | | | | | | |
| 386148.1 | | | | | | | | | | |
| Azospirillum sp. B510 | SEQ ID NO: | 205 | 243 | 39 | 342 | 389 | 46 | 342 | 389 | 46 |
| gi\|288957741\|ref\|YP_003 | 375 | | | | | | | | | |
| 448082.1 | | | | | | | | | | |
| Bradyrhizobium sp. | SEQ ID NO: | 143 | 181 | 39 | 323 | 370 | 48 | 323 | 370 | 48 |
| BTAi1 | 376 | | | | | | | | | |
| gi\|148255343\|ref\|YP_001 | | | | | | | | | | |
| 239928.1 | | | | | | | | | | |
| Parvibaculum | SEQ ID NO: | 138 | 176 | 39 | 327 | 374 | 58 | 327 | 374 | 58 |
| lavamentivorans DS-1 | 377 | | | | | | | | | |
| gi\|154250555\|ref\|YP_001 | | | | | | | | | | |
| 411379.1 | | | | | | | | | | |
| Prevotella timonensis | SEQ ID NO: | 170 | 208 | 39 | 328 | 375 | 61 | 328 | 375 | 61 |
| CRIS 5C-B1 | 378 | | | | | | | | | |
| gi\|282880052\|ref\|ZP_062 | | | | | | | | | | |
| 88774.1 | | | | | | | | | | |
| Bacillus smithii 7 3 | SEQ ID NO: | 134 | 171 | 38 | 401 | 448 | 63 | 401 | 448 | 63 |
| 47FAA | 379 | | | | | | | | | |
| gi\|365156657\|ref\|ZP_093 | | | | | | | | | | |
| 52959.1 | | | | | | | | | | |
| Candidatus | SEQ ID NO: | 135 | 172 | 38 | 344 | 391 | 53 | 344 | 391 | 53 |
| Puniceispirillum marinum | 380 | | | | | | | | | |
| IMCC1322 | | | | | | | | | | |
| gi\|294086111\|ref\|YP_003 | | | | | | | | | | |
| 552871.1 | | | | | | | | | | |
| Barnesiella | SEQ ID NO: | 140 | 176 | 37 | 371 | 417 | 60 | 371 | 417 | 60 |
| intestinihominis YIT | 381 | | | | | | | | | |
| 11860 | | | | | | | | | | |
| gi\|404487228\|ref\|ZP_110 | | | | | | | | | | |
| 22414.1 | | | | | | | | | | |
| Ralstonia syzygii R24 | SEQ ID NO: | 140 | 176 | 37 | 395 | 440 | 50 | 395 | 440 | 50 |
| gi\|344171927\|emb\|CCA8 | 382 | | | | | | | | | |
| 4553.1\| | | | | | | | | | | |
| Wolinella succinogenes | SEQ ID NO: | 145 | 180 | 36 | 348 | 392 | 60 | 348 | 392 | 60 |
| DSM 1740 | 383 | | | | | | | | | |
| gi\|34557790\|ref\|NP_9076 | | | | | | | | | | |
| 05.1\| | | | | | | | | | | |
| Mycoplasma | SEQ ID NO: | 144 | 177 | 34 | 373 | 416 | 71 | 373 | 416 | 71 |
| gallisepticum str. F | 384 | | | | | | | | | |
| gi\|284931710\|gb\|ADC316 | | | | | | | | | | |
| 48.1\| | | | | | | | | | | |
| Acidothermus | SEQ ID NO: | 150 | 182 | 33 | 341 | 380 | 58 | 341 | 380 | 58 |
| cellulolyticus 11B | 385 | | | | | | | | | |
| gi\|117929158\|ref\|YP_873 | | | | | | | | | | |
| 709.1\| | | | | | | | | | | |
| Mycoplasma | SEQ ID NO: | 156 | 184 | 29 | 381 | 420 | 62 | 381 | 420 | 62 |
| ovipneumoniae SC01 | 386 | | | | | | | | | |
| gi\|363542550\|ref\|ZP_093 | | | | | | | | | | |
| 12133.1 | | | | | | | | | | |

TABLE 13
Amino Acid Sequence of Cas9 Core Domains

| | |
|---|---|
| Cas9 Start | Cas9 Stop |
| (AA pos) | (AA pos) |

| | |
|---|---|
| | Start and Stop |
| | numbers refer to the |
| Strain Name | sequence in Table 11 |

| | | |
|---|---|---|
| Staphylococcus | 1 | 772 |
| aureus | | |
| Streptococcus | 1 | 1099 |
| pyogenes | | |
| Campulobacter jejuni | 1 | 741 |

TABLE 14
Identified PAM sequences and corresponding
RKR motifs.

| | PAM | RKR |
|---|---|---|
| | sequence | motif |
| Strain Name | (NA) | (AA) |
| Streptococcus pyogenes | NGG | RKR |
| Streptococcus mutans | NGG | RKR |
| Streptococcus thermophilus A | NGGNG | RYR |
| Treponema denticola | NAAAAN | VAK |
| Streptococcus thermophilus B | NNAAAAW | IYK |
| Campylobacter jejuni | NNNNACA | NLK |
| Pasteurella multocida | GNNNCNNA | KDG |
| Neisseria meningitidis | NNNNGATT or | IGK |
| Staphylococcus aureus | NNGRRV | NDK |
| | (R = A or G; | |
| | V = A. G or C) | |
| | NNGRRT | |
| | (R = A or G) | |

PI domains are provided in Tables 15 and 16.

TABLE 15
Altered PI Domains

| | PI Start | PI Stop | | |
|---|---|---|---|---|
| | (AA pos) | (AA pos) | | |
| | Start and Stop | | | |
| | numbers refer to the | | | RKR |
| | sequences in Table | | Length of | motif |
| Strain Name | 11 | | PI (AA) | (AA) |
| Alicycliphilus denitrificans | 837 | 1029 | 193 | --Y |
| K601 | | | | |
| Campylobacter jejuni | 741 | 984 | 244 | -NG |
| NCTC 11168 | | | | |
| Helicobacter mustelae | 771 | 1024 | 254 | -NQ |
| 12198 | | | | |

TABLE 16
Other Altered PI Domains

| | PI Start | PI Stop | | |
|---|---|---|---|---|
| | (AA pos) | (AA pos) | | |
| | Start and Stop | | | |
| | numbers refer to | | Length | RKR |
| | the sequences in | | of | motif |
| Strain Name | Table 11 | | PI (AA) | (AA) |
| Akkermansia muciniphila ATCC | 871 | 1101 | 231 | ALK |
| BAA-835 | | | | |
| Ralstonia syzygii R24 | 821 | 1062 | 242 | APY |
| Cand. Puniceispirillum marinum | 815 | 1035 | 221 | AYK |
| IMCC1322 | | | | |
| Fructobacillus fructosus | 1074 | 1323 | 250 | DGN |
| KCTC 3544 | | | | |
| Eubacterium yurii ATCC 43715 | 1107 | 1391 | 285 | DGY |
| Eubacterium dolichum DSM 3991 | 779 | 1096 | 318 | DKK |
| Dinoroseobacter shibae DFL 12 | 851 | 1079 | 229 | DPI |
| Clostridium cellulolyticum H10 | 767 | 1021 | 255 | EGK |
| Pasteurella multocida str. Pm70 | 815 | 1056 | 242 | ENN |
| Mycoplasma canis PG 14 | 907 | 1233 | 327 | EPK |
| Porphyromonas sp. oral taxon 279 | 935 | 1197 | 263 | EPT |
| str. F0450 | | | | |
| Filifactor alocis ATCC 35896 | 1094 | 1365 | 272 | EVD |
| Aminomonas paucivorans DSM | 801 | 1052 | 252 | EVY |
| 12260 | | | | |
| Wolinella succinogenes DSM 1740 | 1034 | 1409 | 376 | EYK |
| Oenococcus kitaharae DSM 17330 | 1119 | 1389 | 271 | GAL |
| CoriobacteriumglomeransPW2 | 1126 | 1384 | 259 | GDR |
| Peptoniphilus duerdenii ATCC | 1091 | 1364 | 274 | GDS |
| BAA-1640 | | | | |
| Bifidobacterium bifidum S17 | 1138 | 1420 | 283 | GGL |
| Alicyclobacillus hesperidum | 876 | 1146 | 271 | GGR |
| URH17-3-68 | | | | |
| Roseburia inulinivorans DSM | 895 | 1152 | 258 | GGT |
| 16841 | | | | |
| Actinomyces coleocanis DSM | 843 | 1105 | 263 | GKK |
| 15436 | | | | |
| Odoribacter laneus YIT 12061 | 1103 | 1498 | 396 | GKV |
| Coprococcus catus GD-7 | 1063 | 1338 | 276 | GNQ |
| Enterococcus faecalis TX0012 | 829 | 1150 | 322 | GRK |
| Bacillus smithii 7 3 47FAA | 809 | 1088 | 280 | GSK |
| Legionella pneumophila str. Paris | 1021 | 1372 | 352 | GTM |
| Bacteroides fragilis NCTC 9343 | 1140 | 1436 | 297 | IPV |
| Mycoplasma ovipneumoniae SC01 | 923 | 1265 | 343 | IRI |
| Actinomyces sp. oral taxon 180 str. | 895 | 1181 | 287 | KEK |
| F0310 | | | | |
| Treponema sp. JC4 | 832 | 1062 | 231 | KIS |
| Fusobacteriumnucleatum | 1073 | 1374 | 302 | KKV |
| ATCC49256 | | | | |
| Lactobacillus farciminis KCTC | 1101 | 1356 | 256 | KKV |
| 3681 | | | | |
| Nitratifractor salsuginis | 840 | 1132 | 293 | KMR |
| DSM 16511 | | | | |
| Lactobacillus coryniformis KCTC | 850 | 1119 | 270 | KNK |
| 3535 | | | | |
| Mycoplasma mobile 163K | 916 | 1236 | 321 | KNY |
| Flavobacterium branchiophilum | 1182 | 1473 | 292 | KQK |
| FL-15 | | | | |
| Prevotella timonensis CRIS 5C-B1 | 957 | 1218 | 262 | KQQ |
| Methylosinus trichosporium OB3b | 830 | 1082 | 253 | KRP |
| Prevotella sp. C561 | 1099 | 1424 | 326 | KRY |
| Mycoplasma gallisepticum str. F | 911 | 1269 | 359 | KTA |
| Lactobacillus rhamnosus GG | 1077 | 1363 | 287 | KYG |
| Wolinella succinogenes DSM 1740 | 811 | 1059 | 249 | LPN |
| Streptococcus thermophilus LMD-9 | 1099 | 1388 | 290 | MLA |
| Treponema denticola ATCC 35405 | 1092 | 1395 | 304 | NDS |
| Bergeyella zoohelcum ATCC 43767 | 1098 | 1415 | 318 | NEK |
| Veillonella atypica ACS-134-V- | 1107 | 1398 | 292 | NGF |
| Col7a | | | | |
| Neisseria meningitidis Z2491 | 835 | 1082 | 248 | NHN |
| Ignavibacterium album JCM 16511 | 1296 | 1688 | 393 | NKK |
| Ruminococcus albus 8 | 853 | 1156 | 304 | NNF |
| Streptococcus thermophilus LMD-9 | 811 | 1121 | 311 | NNK |
| Barnesiella intestinihominis YIT | 871 | 1153 | 283 | NPV |
| 11860 | | | | |
| Azospirillum sp. B510 | 911 | 1168 | 258 | PFH |
| Rhodospirillum rubrum ATCC | 863 | 1173 | 311 | PRG |
| 11170 | | | | |
| Planococcus antarcticus DSM | 1087 | 1333 | 247 | PYY |
| 14505 | | | | |
| Staphylococcus | 1073 | 1334 | 262 | QIV |
| pseudintermedius ED99 | | | | |
| Alcanivorax sp. W11-5 | 843 | 1113 | 271 | RIE |
| Bradyrhizobium sp. BTAil | 811 | 1064 | 254 | RIY |
| Streptococcus pyogenes M1 GAS | 1099 | 1368 | 270 | RKR |
| Streptococcus mutans UA159 | 1078 | 1345 | 268 | RKR |
| Streptococcus Pyogenes | 1099 | 1368 | 270 | RKR |
| Bacteroides sp. 20 3 | 1147 | 1517 | 371 | RNI |
| S. aureus | 772 | 1053 | 282 | RNK |
| Solobacterium moorei F0204 | 1062 | 1327 | 266 | RSG |
| Finegoldia magna ATCC 29328 | 1081 | 1348 | 268 | RTE |
| uncultured delta proteobacterium | 770 | 1011 | 242 | SGG |
| HF0070 07E19 | | | | |
| Acidaminococcus sp. D21 | 1064 | 1358 | 295 | SIG |
| Eubacterium rectale ATCC 33656 | 824 | 1114 | 291 | SKK |
| Caenispirillum salinarum AK4 | 1048 | 1442 | 395 | SLV |
| Acidothermus cellulolyticus 11B | 830 | 1138 | 309 | SPS |
| Catenibacterium mitsuokai DSM | 1068 | 1329 | 262 | SPT |
| 15897 | | | | |
| Parvibaculum lavamentivorans | 827 | 1037 | 211 | TGN |
| DS-1 | | | | |
| Staphylococcus lugdunensis | 772 | 1054 | 283 | TKK |
| M23590 | | | | |
| Streptococcus sanguinis SK49 | 1123 | 1421 | 299 | TRM |
| Elusimicrobium minutum Pei191 | 910 | 1195 | 286 | TTG |
| Nitrobacter hamburgensis X14 | 914 | 1166 | 253 | VAY |
| Mycoplasma synoviae 53 | 991 | 1314 | 324 | VGF |
| Sphaerochaeta globus str. Buddy | 877 | 1179 | 303 | VKG |
| Ilyobacter polytropus DSM 2926 | 837 | 1092 | 256 | VNG |
| Rhodovulum sp. PH10 | 821 | 1059 | 239 | VPY |
| Bifidobacterium longum DJO10A | 904 | 1187 | 284 | VRK |

### Nucleic Acids Encoding Cas9 Molecules

[1230] Nucleic acids encoding the Cas9 molecules or Cas9 polypeptides, e.g., an eaCas9 molecule or eaCas9 polypeptide, are provided herein.

[1231] Exemplary nucleic acids encoding Cas9 molecules or Cas9 polypeptides are described in Cong 2013; Wang 2013; Mali 2013; and Jinek 2012. Another exemplary nucleic acid encoding a Cas9 molecule or Cas9 polypeptide is shown in black in FIG. 8.

[1232] In an embodiment, a nucleic acid encoding a Cas9 molecule or Cas9 polypeptide can be a synthetic nucleic acid sequence. For example, the synthetic nucleic acid molecule can be chemically modified, e.g., as described in Section VIII. In an embodiment, the Cas9 mRNA has one or more (e.g., all of the following properties: it is capped, polyadenylated, substituted with 5-methylcytidine and/or pseudouridine.

[1233] In addition, or alternatively, the synthetic nucleic acid sequence can be codon optimized, e.g., at least one non-common codon or less-common codon has been replaced by a common codon. For example, the synthetic nucleic acid can direct the synthesis of an optimized messenger mRNA, e.g., optimized for expression in a mammalian expression system, e.g., described herein.

[1234] In addition, or alternatively, a nucleic acid encoding a Cas9 molecule or Cas9 polypeptide may comprise a nuclear localization sequence (NLS). Nuclear localization sequences are known in the art.

[1235] An exemplary codon optimized nucleic acid sequence encoding a Cas9 molecule of S. pyogenes is set forth in SEQ ID NO: 22. The corresponding amino acid sequence is set forth in SEQ ID NO: 2.

[1236] An exemplary codon optimized nucleic acid sequence encoding a Cas9 molecule of N. meningitidis is set forth in SEQ ID NO: 24. The corresponding amino acid sequence is set forth in SEQ ID NO: 25.

[1237] An amino acid sequence of a S. aureus Cas9 molecule is set forth in SEQ ID NO: 26. An exemplary codon optimized nucleic acid sequence encoding a Cas9 molecule of S. aureus is set forth in SEQ ID NO: 39.

[1238] If any of the above Cas9 sequences are fused with a peptide or polypeptide at the C-terminus, it is understood that the stop codon will be removed.

### Other Cas Molecules and Cas Polypeptides

[1239] Various types of Cas molecules or Cas polypeptides can be used to practice the inventions disclosed herein. In some embodiments, Cas molecules of Type II Cas systems are used. In other embodiments, Cas molecules of other Cas systems are used. For example, Type I or Type III Cas molecules may be used. Exemplary Cas molecules (and Cas systems) are described, e.g., in Haft 2005 and Makarova 2011, the contents of both references are incorporated herein by reference in their entirety. Exemplary Cas molecules (and Cas systems) are also shown in Table 17.

TABLE 17
Cas Systems

| | | | Structure of | | |
|---|---|---|---|---|---|
| | | | encoded | Families (and | |
| | System | | protein | superfamily) | |
| Gene | type or | Name from | (PDB | of encoded | |
| name^{‡} | subtype | Haft 2005^{§} | accessions)^{¶} | protein^{#}** | Representatives |
| cas1 | Type I | cas1 | 3GOD, | COG1518 | SERP2463, |
| | Type II | | 3LFX and | | SPy1047 and |
| | Type III | | 2YZS | | ygbT |
| cas2 | Type I | cas2 | 2IVY, 2I8E | COG1343 and | SERP2462, |
| | Type II | | and 3EXC | COG3512 | SPy1048, |
| | Type III | | | | SPy1723 (N- |
| | | | | | terminal domain) |
| | | | | | and ygbF |
| cas3′ | Type I^{‡‡} | cas3 | NA | COG1203 | APE1232 and |
| | | | | | ygcB |
| cas3″ | Subtype | NA | NA | COG2254 | APE1231 and |
| | I-A | | | | BH0336 |
| | Subtype | | | | |
| | I-B | | | | |
| cas4 | Subtype | cas4 and | NA | COG1468 | APE1239 and |
| | I-A | csa1 | | | BH0340 |
| | Subtype | | | | |
| | I-B | | | | |
| | Subtype | | | | |
| | I-C | | | | |
| | Subtype | | | | |
| | I-D | | | | |
| | Subtype | | | | |
| | II-B | | | | |
| cas5 | Subtype | cas5a, | 3KG4 | COG1688 | APE1234, |
| | I-A | cas5d, | | (RAMP) | BH0337, devS |
| | Subtype | cas5e, | | | and ygcI |
| | I-B | cas5h, | | | |
| | Subtype | cas5p, cas5t | | | |
| | I-C | and cmx5 | | | |
| | Subtype | | | | |
| | I-E | | | | |
| cas6 | Subtype | cas6 and | 3I4H | COG1583 and | PF1131 and |
| | I-A | cmx6 | | COG5551 | slr7014 |
| | Subtype | | | (RAMP) | |
| | I-B | | | | |
| | Subtype | | | | |
| | I-D | | | | |
| | Subtype | | | | |
| | III-A | | | | |
| | Subtype | | | | |
| | III-B | | | | |
| cas6e | Subtype | cse3 | 1WJ9 | (RAMP) | ygcH |
| | I-E | | | | |
| cas6f | Subtype | csy4 | 2XLJ | (RAMP) | y1727 |
| | I-F | | | | |
| cas7 | Subtype | csa2, csd2, | NA | COG1857 and | devR and ygcJ |
| | I-A | cse4, csh2, | | COG3649 | |
| | Subtype | csp1 and | | (RAMP) | |
| | I-B | cst2 | | | |
| | Subtype | | | | |
| | I-C | | | | |
| | Subtype | | | | |
| | I-E | | | | |
| cas8a1 | Subtype | cmx1, cst1, | NA | BH0338-like | LA3191^{§§} and |
| | I-A^{‡‡} | csx8, csx13 | | | PG2018^{§§} |
| | | and CXXC- | | | |
| | | CXXC | | | |
| cas8a2 | Subtype | csa4 and | NA | PH0918 | AF0070, AF1873, |
| | I-A^{‡‡} | csx9 | | | MJ0385, PF0637, |
| | | | | | PH0918 and |
| | | | | | SSO1401 |
| cas8b | Subtype | csh1 and | NA | BH0338-like | MTH1090 and |
| | I-B^{‡‡} | TM1802 | | | TM1802 |
| cas8c | Subtype | csd1 and | NA | BH0338-like | BH0338 |
| | I-C^{‡‡} | csp2 | | | |
| cas9 | Type II^{‡‡} | csn1 and | NA | COG3513 | FTN_0757 and |
| | | csx12 | | | SPy1046 |
| cas10 | Type III^{‡‡} | cmr2, csm1 | NA | COG1353 | MTH326, |
| | | and csx11 | | | Rv2823c^{§§} and |
| | | | | | TM1794^{§§} |
| cas10d | Subtype | csc3 | NA | COG1353 | slr7011 |
| | I-D^{‡‡} | | | | |
| csy1 | Subtype | csy1 | NA | y1724-like | y1724 |
| | I-F^{‡‡} | | | | |
| csy2 | Subtype | csy2 | NA | (RAMP) | y1725 |
| | I-F | | | | |
| csy3 | Subtype | csy3 | NA | (RAMP) | y1726 |
| | I-F | | | | |
| cse1 | Subtype | cse1 | NA | YgcL-like | ygcL |
| | I-E^{‡‡} | | | | |
| cse2 | Subtype | cse2 | 2ZCA | YgcK-like | ygcK |
| | I-E | | | | |
| csc1 | Subtype | csc1 | NA | alr1563-like | alr1563 |
| | I-D | | | (RAMP) | |
| csc2 | Subtype | csc1 and | NA | COG1337 | slr7012 |
| | I-D | csc2 | | (RAMP) | |
| csa5 | Subtype | csa5 | NA | AF1870 | AF1870, MJ0380, |
| | I-A | | | | PF0643 and |
| | | | | | SSO1398 |
| csn2 | Subtype | csn2 | NA | SPy1049-like | SPy1049 |
| | II-A | | | | |
| csm2 | Subtype | csm2 | NA | COG1421 | MTH1081 and |
| | III-A^{‡‡} | | | | SERP2460 |
| csm3 | Subtype | csc2 and | NA | COG1337 | MTH1080 and |
| | III-A | csm3 | | (RAMP) | SERP2459 |
| csm4 | Subtype | csm4 | NA | COG1567 | MTH1079 and |
| | III-A | | | (RAMP) | SERP2458 |
| csm5 | Subtype | csm5 | NA | COG1332 | MTH1078 and |
| | III-A | | | (RAMP) | SERP2457 |
| csm6 | Subtype | APE2256 | 2WTE | COG1517 | APE2256 and |
| | III-A | and csm6 | | | SSO1445 |
| cmr1 | Subtype | cmr1 | NA | COG1367 | PF1130 |
| | III-B | | | (RAMP) | |
| cmr3 | Subtype | cmr3 | NA | COG1769 | PF1128 |
| | III-B | | | (RAMP) | |
| cmr4 | Subtype | cmr4 | NA | COG1336 | PF1126 |
| | III-B | | | (RAMP) | |
| cmr5 | Subtype | cmr5 | 2ZOP and | COG3337 | MTH324 and |
| | III-B^{‡‡} | | 2OEB | | PF1125 |
| cmr6 | Subtype | cmr6 | NA | COG1604 | PF1124 |
| | III-B | | | (RAMP) | |
| csb1 | Subtype | GSU0053 | NA | (RAMP) | Balac_1306 and |
| | I-U | | | | GSU0053 |
| csb2 | Subtype | NA | NA | (RAMP) | Balac_1305 and |
| | I-U^{§§} | | | | GSU0054 |
| csb3 | Subtype | NA | NA | (RAMP) | Balac_1303^{§§} |
| | I-U | | | | |
| csx17 | Subtype | NA | NA | NA | Btus_2683 |
| | I-U | | | | |
| csx14 | Subtype | NA | NA | NA | GSU0052 |
| | I-U | | | | |
| csx10 | Subtype | csx10 | NA | (RAMP) | Caur_2274 |
| | I-U | | | | |
| csx16 | Subtype | VVA1548 | NA | NA | VVA1548 |
| | III-U | | | | |
| csaX | Subtype | csaX | NA | NA | SSO1438 |
| | III-U | | | | |
| csx3 | Subtype | csx3 | NA | NA | AF1864 |
| | III-U | | | | |
| csx1 | Subtype | csa3, csx1, | 1XMX and | COG1517 and | MJ1666, |
| | III-U | csx2, | 2I71 | COG4006 | NE0113, PF1127 |
| | | DXTHG, | | | and TM1812 |
| | | NE0113 and | | | |
| | | TIGR02710 | | | |
| csx15 | Unknown | NA | NA | TTE2665 | TTE2665 |
| csf1 | Type U | csf1 | NA | NA | AFE_1038 |
| csf2 | Type U | csf2 | NA | (RAMP) | AFE_1039 |
| csf3 | Type U | csf3 | NA | (RAMP) | AFE_1040 |
| csf4 | Type U | csf4 | NA | NA | AFE_1037 |

### V. Functional Analysis of Candidate Molecules

[1240] Candidate Cas9 molecules, candidate gRNA molecules, candidate Cas9 molecule/gRNA molecule complexes, can be evaluated by art-known methods or as described herein. For example, exemplary methods for evaluating the endonuclease activity of Cas9 molecule are described, e.g., in Jinek 2012.

### Binding and Cleavage Assay: Testing the Endonuclease Activity of Cas9 Molecule

[1241] The ability of a Cas9 molecule/gRNA molecule complex to bind to and cleave a target nucleic acid can be evaluated in a plasmid cleavage assay. In this assay, synthetic or in vitro-transcribed gRNA molecule is pre-annealed prior to the reaction by heating to 95° C. and slowly cooling down to room temperature. Native or restriction digest-linearized plasmid DNA (300 ng (˜8 nM)) is incubated for 60 min at 37° C. with purified Cas9 protein molecule (50-500 nM) and gRNA (50-500 nM, 1:1) in a Cas9 plasmid cleavage buffer (20 mM HEPES pH 7.5, 150 mM KCl, 0.5 mM DTT, 0.1 mM EDTA) with or without 10 mM MgCl₂. The reactions are stopped with 5×DNA loading buffer (30% glycerol, 1.2% SDS, 250 mM EDTA), resolved by a 0.8 or 1% agarose gel electrophoresis and visualized by ethidium bromide staining. The resulting cleavage products indicate whether the Cas9 molecule cleaves both DNA strands, or only one of the two strands. For example, linear DNA products indicate the cleavage of both DNA strands. Nicked open circular products indicate that only one of the two strands is cleaved.

[1242] Alternatively, the ability of a Cas9 molecule/gRNA molecule complex to bind to and cleave a target nucleic acid can be evaluated in an oligonucleotide DNA cleavage assay. In this assay, DNA oligonucleotides (10 pmol) are radiolabeled by incubating with 5 units T4 polynucleotide kinase and ˜3-6 pmol (˜20-40 mCi) [γ-32P]-ATP in 1×T4 polynucleotide kinase reaction buffer at 37° C. for 30 min, in a 50 μL reaction. After heat inactivation (65° C. for 20 min), reactions are purified through a column to remove unincorporated label. Duplex substrates (100 nM) are generated by annealing labeled oligonucleotides with equimolar amounts of unlabeled complementary oligonucleotide at 95° C. for 3 min, followed by slow cooling to room temperature. For cleavage assays, gRNA molecules are annealed by heating to 95° C. for 30 s, followed by slow cooling to room temperature. Cas9 (500 nM final concentration) is pre-incubated with the annealed gRNA molecules (500 nM) in cleavage assay buffer (20 mM HEPES pH 7.5, 100 mM KCl, 5 mM MgCl2, 1 mM DTT, 5% glycerol) in a total volume of 9 al. Reactions are initiated by the addition of 1 μl target DNA (10 nM) and incubated for 1 h at 37° C. Reactions are quenched by the addition of 20 μl of loading dye (5 mM EDTA, 0.025% SDS, 5% glycerol in formamide) and heated to 95° C. for 5 min. Cleavage products are resolved on 12% denaturing polyacrylamide gels containing 7 M urea and visualized by phosphorimaging. The resulting cleavage products indicate that whether the complementary strand, the non-complementary strand, or both, are cleaved.

[1243] One or both of these assays can be used to evaluate the suitability of a candidate gRNA molecule or candidate Cas9 molecule.

### Binding Assay: Testing the Binding of Cas9 Molecule to Target DNA

[1244] Exemplary methods for evaluating the binding of Cas9 molecule to target DNA are described, e.g., in Jinek 2012.

[1245] For example, in an electrophoretic mobility shift assay, target DNA duplexes are formed by mixing of each strand (10 nmol) in deionized water, heating to 95° C. for 3 min and slow cooling to room temperature. All DNAs are purified on 8% native gels containing 1×TBE. DNA bands are visualized by UV shadowing, excised, and eluted by soaking gel pieces in DEPC-treated H₂O. Eluted DNA is ethanol precipitated and dissolved in DEPC-treated H₂O. DNA samples are 5′ end labeled with [γ-32P]-ATP using T4 polynucleotide kinase for 30 min at 37° C. Polynucleotide kinase is heat denatured at 65° C. for 20 min, and unincorporated radiolabel is removed using a column. Binding assays are performed in buffer containing 20 mM HEPES pH 7.5, 100 mM KCl, 5 mM MgCl₂, 1 mM DTT and 10% glycerol in a total volume of 10 al. Cas9 protein molecule is programmed with equimolar amounts of pre-annealed gRNA molecule and titrated from 100 pM to 1 μM. Radiolabeled DNA is added to a final concentration of 20 pM. Samples are incubated for 1 h at 37° C. and resolved at 4° C. on an 8% native polyacrylamide gel containing 1×TBE and 5 mM MgCl₂. Gels are dried and DNA visualized by phosphorimaging.

### Differential Scanning Flourimetry (DSF)

[1246] The thermostability of Cas9-gRNA ribonucleoprotein (RNP) complexes can be measured via DSF. This technique measures the thermostability of a protein, which can increase under favorable conditions such as the addition of a binding RNA molecule, e.g., a gRNA.

[1247] The assay is performed using two different protocols, one to test the best stoichiometric ratio of gRNA:Cas9 protein and another to determine the best solution conditions for RNP formation.

[1248] To determine the best solution to form RNP complexes, a 2 uM solution of Cas9 in water+10x SYPRO Orange® (Life Technologies cat#S-6650) and dispensed into a 384 well plate. An equimolar amount of gRNA diluted in solutions with varied pH and salt is then added. After incubating at room temperature for 10′ and brief centrifugation to remove any bubbles, a Bio-Rad CFX384™ Real-Time System C 1000 Touch™ Thermal Cycler with the Bio-Rad CFX Manager software is used to run a gradient from 20° C. to 90° C. with a 10 increase in temperature every 10 seconds.

[1249] The second assay consists of mixing various concentrations of gRNA with 2 uM Cas9 in optimal buffer from assay 1 above and incubating at RT for 10′ in a 384 well plate. An equal volume of optimal buffer+10x SYPRO Orange® (Life Technologies cat#S-6650) is added and the plate sealed with Microseal® B adhesive (MSB-1001). Following brief centrifugation to remove any bubbles, a Bio-Rad CFX384™ Real-Time System C1000 Touch™ Thermal Cycler with the Bio-Rad CFX Manager software is used to run a gradient from 20° C. to 90° C. with a 10 increase in temperature every 10 seconds.

### VI. Genome Editing Approaches

[1250] While not wishing to be bound by theory, altering the LCA10 target position may be achieved using one of the approaches discussed herein.

### NHEJ Approaches for Gene Targeting

[1251] As described herein, nuclease-induced non-homologous end-joining (NHEJ) can be used to introduce indels at a target position. Nuclease-induced NHEJ can also be used to remove (e.g., delete) genomic sequence including the mutation at a target position in a gene of interest.

[1252] While not wishing to be bound by theory, it is believed that, in an embodiment, the genomic alterations associated with the methods described herein rely on nuclease-induced NHEJ and the error-prone nature of the NHEJ repair pathway. NHEJ repairs a double-strand break in the DNA by joining together the two ends; however, generally, the original sequence is restored only if two compatible ends, exactly as they were formed by the double-strand break, are perfectly ligated. The DNA ends of the double-strand break are frequently the subject of enzymatic processing, resulting in the addition or removal of nucleotides, at one or both strands, prior to rejoining of the ends. This results in the presence of insertion and/or deletion (indel) mutations in the DNA sequence at the site of the NHEJ repair.

[1253] The indel mutations generated by NHEJ are unpredictable in nature; however, at a given break site certain indel sequences are favored and are over represented in the population, likely due to small regions of microhomology. The lengths of deletions can vary widely; most commonly in the 1-50 bp range, but they can easily reach greater than 100-200 bp. Insertions tend to be shorter and often include short duplications of the sequence immediately surrounding the break site. However, it is possible to obtain large insertions, and in these cases, the inserted sequence has often been traced to other regions of the genome or to plasmid DNA present in the cells.

[1254] Because NHEJ is a mutagenic process, it can also be used to delete small sequence motifs as long as the generation of a specific final sequence is not required. If a double-strand break is targeted near to a short target sequence, the deletion mutations caused by the NHEJ repair often span, and therefore remove, the unwanted nucleotides. For the deletion of larger DNA segments, introducing two double-strand breaks, one on each side of the sequence, can result in NHEJ between the ends with removal of the entire intervening sequence. Both of these approaches can be used to delete specific DNA sequences; however, the error-prone nature of NHEJ may still produce indel mutations at the site of deletion.

[1255] Both double strand cleaving eaCas9 molecules and single strand, or nickase, eaCas9 molecules can be used in the methods and compositions described herein to generate break-induced indels.

### Double Strand Break

[1256] In an embodiment, double strand cleavage is effected by a Cas9 molecule having cleavage activity associated with an HNH-like domain and cleavage activity associated with a RuvC-like domain, e.g., an N-terminal RuvC-like domain, e.g., a wild type Cas9. Such embodiments require only a single gRNA.

### Single Strand Break

[1257] In other embodiments, two single strand breaks are effected by a Cas9 molecule having nickase activity, e.g., cleavage activity associated with an HNH-like domain or cleavage activity associated with an N-terminal RuvC-like domain. Such embodiments require two gRNAs, one for placement of each single strand break. In an embodiment, the Cas9 molecule having nickase activity cleaves the strand to which the gRNA hybridizes, but not the strand that is complementary to the strand to which the gRNA hybridizes. In an embodiment, the Cas9 molecule having nickase activity does not cleave the strand to which the gRNA hybridizes, but rather cleaves the strand that is complementary to the strand to which the gRNA hybridizes.

[1258] In an embodiment, the nickase has HNH activity, e.g., a Cas9 molecule having the RuvC activity inactivated, e.g., a Cas9 molecule having a mutation at D10, e.g., the D10A mutation. D10A inactivates RuvC therefore the Cas9 nickase has (only) HNH activity and will cut on the strand to which the gRNA hybridizes (the complementary strand, which does not have the NGG PAM on it). In other embodiments, a Cas9 molecule having an H840, e.g., an H840A, mutation can be used as a nickase. H840A inactivates HNH therefore the Cas9 nickase has (only) RuvC activity and cuts on the non-complementary strand (the strand that has the NGG PAM and whose sequence is identical to the gRNA). In other embodiments, a Cas9 molecule having an H863, e.g., an H863A, mutation can be used as a nickase. H863A inactivates HNH therefore the Cas9 nickase has (only) RuvC activity and cuts on the non-complementary strand (the strand that has the NGG PAM and whose sequence is identical to the gRNA).

[1259] In an embodiment, in which a nickase and two gRNAs are used to position two single strand breaks, one nick is on the + strand and one nick is on the − strand of the target nucleic acid. The PAMs can be outwardly facing. The gRNAs can be selected such that the gRNAs are separated by, from 0-50, 0-100, or 0-200 nucleotides. In an embodiment, there is no overlap between the target sequences that are complementary to the targeting domains of the two gRNAs. In an embodiment, the gRNAs do not overlap and are separated by as much as 50, 100, or 200 nucleotides. In an embodiment, the use of two gRNAs can increase specificity, e.g., by decreasing off-target binding (Ran 2013).

### Placement of Double Strand or Single Strand Breaks Relative to the Target Position

[1260] In an embodiment, in which a gRNA and Cas9 nuclease generate a double strand break for the purpose of inducing break-induced indels, a gRNA, e.g., a unimolecular (or chimeric) or modular gRNA molecule, is configured to position one double-strand break in close proximity to a nucleotide of the target position. In an embodiment, the cleavage site is between 0-40 bp away from the target position (e.g., less than 40, 35, 30, 25, 20, 15, 10, 9, 8, 7, 6, 5, 4, 3, 2 or 1 bp from the target position).

[1261] In an embodiment, in which two gRNAs complexing with a Cas9 nickase induce two single strand breaks for the purpose of introducing break-induced indels, two gRNAs, e.g., independently, unimolecular (or chimeric) or modular gRNA, are configured to position two single-strand breaks to provide for NHEJ-mediated alteration of a nucleotide of the target position. In an embodiment, the gRNAs are configured to position cuts at the same position, or within a few nucleotides of one another, on different strands, essentially mimicking a double strand break. In an embodiment, the two nicks are between 0-40 bp away from the target position (e.g., less than 40, 35, 30, 25, 20, 15, 10, 9, 8, 7, 6, 5, 4, 3, 2 or 1 bp from the target position) respectively, and the two single strand breaks are within 25-55 bp of each other (e.g., between 25 to 50, 25 to 45, 25 to 40, 25 to 35, 25 to 30, 50 to 55, 45 to 55, 40 to 55, 35 to 55, 30 to 55, 30 to 50, 35 to 50, 40 to 50, 45 to 50, 35 to 45, or 40 to 45 bp) and no more than 100 bp away from each other (e.g., no more than 90, 80, 70, 60, 50, 40, 30, 20 or 10 bp). In an embodiment, the gRNAs are configured to place a single strand break on either side of the target position. In an embodiment, the gRNAs are configured to place a single strand break on the same side (either 5′ or 3′) of the target position.

[1262] Regardless of whether a break is a double strand or a single strand break, the gRNA should be configured to avoid unwanted target chromosome elements, such as repeated elements, e.g., an Alu repeat, in the target domain. In addition, a break, whether a double strand or a single strand break, should be sufficiently distant from any sequence that should not be altered. For example, cleavage sites positioned within introns should be sufficiently distant from any intron/exon border, or naturally occurring splice signal, to avoid alteration of the exonic sequence or unwanted splicing events.

### Single-Strand Annealing

[1263] Single strand annealing (SSA) is another DNA repair process that repairs a double-strand break between two repeat sequences present in a target nucleic acid. Repeat sequences utilized by the SSA pathway are generally greater than 30 nucleotides in length. Resection at the break ends occurs to reveal repeat sequences on both strands of the target nucleic acid. After resection, single strand overhangs containing the repeat sequences are coated with RPA protein to prevent the repeats sequences from inappropriate annealing, e.g., to themselves. RAD52 binds to and each of the repeat sequences on the overhangs and aligns the sequences to enable the annealing of the complementary repeat sequences. After annealing, the single-strand flaps of the overhangs are cleaved. New DNA synthesis fills in any gaps, and ligation restores the DNA duplex. As a result of the processing, the DNA sequence between the two repeats is deleted. The length of the deletion can depend on many factors including the location of the two repeats utilized, and the pathway or processivity of the resection.

[1264] In contrast to HDR pathways, SSA does not require a template nucleic acid to alter or correct a target nucleic acid sequence. Instead, the complementary repeat sequence is utilized.

### Other DNA Repair Pathways

### SSBR (Single Strand Break Repair)

[1265] Single-stranded breaks (SSB) in the genome are repaired by the SSBR pathway, which is a distinct mechanism from the DSB repair mechanisms discussed above. The SSBR pathway has four major stages: SSB detection, DNA end processing, DNA gap filling, and DNA ligation. A more detailed explanation is given in Caldecott, Nature Reviews Genetics 9, 619-631 (August 2008), and a summary is given here.

[1266] In the first stage, when a SSB forms, PARP1 and/or PARP2 recognize the break and recruit repair machinery. The binding and activity of PARP1 at DNA breaks is transient and it seems to accelerate SSBr by promoting the focal accumulation or stability of SSBr protein complexes at the lesion. Arguably the most important of these SSBr proteins is XRCC1, which functions as a molecular scaffold that interacts with, stabilizes, and stimulates multiple enzymatic components of the SSBr process including the protein responsible for cleaning the DNA 3′ and 5′ ends. For instance, XRCC1 interacts with several proteins (DNA polymerase beta, PNK, and three nucleases, APE1, APTX, and APLF) that promote end processing. APE1 has endonuclease activity. APLF exhibits endonuclease and 3′ to 5′ exonuclease activities. APTX has endonuclease and 3′ to 5′ exonuclease activity.

[1267] This end processing is an important stage of SSBR since the 3′- and/or 5′-termini of most, if not all, SSBs are ‘damaged’. End processing generally involves restoring a damaged 3′-end to a hydroxylated state and and/or a damaged 5′ end to a phosphate moiety, so that the ends become ligation-competent. Enzymes that can process damaged 3′ termini include PNKP, APE1, and TDP1. Enzymes that can process damaged 5′ termini include PNKP, DNA polymerase beta, and APTX. LIG3 (DNA ligase III) can also participate in end processing. Once the ends are cleaned, gap filling can occur.

[1268] At the DNA gap filling stage, the proteins typically present are PARP1, DNA polymerase beta, XRCC1, FEN1 (flap endonuclease 1), DNA polymerase delta/epsilon, PCNA, and LIG1. There are two ways of gap filling, the short patch repair and the long patch repair. Short patch repair involves the insertion of a single nucleotide that is missing. At some SSBs, “gap filling” might continue displacing two or more nucleotides (displacement of up to 12 bases have been reported). FEN1 is an endonuclease that removes the displaced 5′-residues. Multiple DNA polymerases, including Pol 3, are involved in the repair of SSBs, with the choice of DNA polymerase influenced by the source and type of SSB.

[1269] In the fourth stage, a DNA ligase such as LIG1 (Ligase I) or LIG3 (Ligase III) catalyzes joining of the ends. Short patch repair uses Ligase III and long patch repair uses Ligase I.

[1270] Sometimes, SSBR is replication-coupled. This pathway can involve one or more of CtIP, MRN, ERCC1, and FEN1. Additional factors that may promote SSBR include: aPARP, PARP1, PARP2, PARG, XRCC1, DNA polymerase b, DNA polymerase d, DNA polymerase e, PCNA, LIG1, PNK, PNKP, APE1, APTX, APLF, TDP1, LIG3, FEN1, CtIP, MRN, and ERCC1.

### MMR (Mismatch Repair)

[1271] Cells contain three excision repair pathways: MMR, BER, and NER. The excision repair pathways have a common feature in that they typically recognize a lesion on one strand of the DNA, then exo/endonucleases remove the lesion and leave a 1-30 nucleotide gap that is sub-sequentially filled in by DNA polymerase and finally sealed with ligase. A more complete picture is given in Li 2008, and a summary is provided here.

[1272] Mismatch repair (MMR) operates on mispaired DNA bases.

[1273] The MSH2/6 or MSH2/3 complexes both have ATPases activity that plays an important role in mismatch recognition and the initiation of repair. MSH2/6 preferentially recognizes base-base mismatches and identifies mispairs of 1 or 2 nucleotides, while MSH2/3 preferentially recognizes larger ID mispairs.

[1274] hMLH1 heterodimerizes with hPMS2 to form hMutLa which possesses an ATPase activity and is important for multiple steps of MMR. It possesses a PCNA/replication factor C (RFC)-dependent endonuclease activity which plays an important role in 3′ nick-directed MMR involving EXO1 (EXO1 is a participant in both HR and MMR). It regulates termination of mismatch-provoked excision. Ligase I is the relevant ligase for this pathway. Additional factors that may promote MMR include: EXO1, MSH2, MSH3, MSH6, MLH1, PMS2, MLH3, DNA Pol d, RPA, HMGB1, RFC, and DNA ligase I.

### Base Excision Repair (BER)

[1275] The base excision repair (BER) pathway is active throughout the cell cycle; it is responsible primarily for removing small, non-helix-distorting base lesions from the genome. In contrast, the related Nucleotide Excision Repair pathway (discussed in the next section) repairs bulky helix-distorting lesions. A more detailed explanation is given in Caldecott, Nature Reviews Genetics 9, 619-631 (August 2008), and a summary is given here.

[1276] Upon DNA base damage, base excision repair (BER) is initiated and the process can be simplified into five major steps: (a) removal of the damaged DNA base; (b) incision of the subsequent a basic site; (c) clean-up of the DNA ends; (d) insertion of the correct nucleotide into the repair gap; and (e) ligation of the remaining nick in the DNA backbone. These last steps are similar to the SSBR.

[1277] In the first step, a damage-specific DNA glycosylase excises the damaged base through cleavage of the N-glycosidic bond linking the base to the sugar phosphate backbone. Then AP endonuclease-1 (APE1) or bifunctional DNA glycosylases with an associated lyase activity incised the phosphodiester backbone to create a DNA single strand break (SSB). The third step of BER involves cleaning-up of the DNA ends. The fourth step in BER is conducted by Pol 3 that adds a new complementary nucleotide into the repair gap and in the final step XRCC1/Ligase III seals the remaining nick in the DNA backbone. This completes the short-patch BER pathway in which the majority (˜80%) of damaged DNA bases are repaired. However, if the 5′-ends in step 3 are resistant to end processing activity, following one nucleotide insertion by Pol 3 there is then a polymerase switch to the replicative DNA polymerases, Pol 6/c, which then add ˜2-8 more nucleotides into the DNA repair gap. This creates a 5′-flap structure, which is recognized and excised by flap endonuclease-1 (FEN-1) in association with the processivity factor proliferating cell nuclear antigen (PCNA). DNA ligase I then seals the remaining nick in the DNA backbone and completes long-patch BER. Additional factors that may promote the BER pathway include: DNA glycosylase, APE1, Polb, Pold, Pole, XRCC1, Ligase III, FEN-1, PCNA, RECQL4, WRN, MYH, PNKP, and APTX.

### Nucleotide Excision Repair (NER)

[1278] Nucleotide excision repair (NER) is an important excision mechanism that removes bulky helix-distorting lesions from DNA. Additional details about NER are given in Marteijn 2014, and a summary is given here. NER a broad pathway encompassing two smaller pathways: global genomic NER (GG-NER) and transcription coupled repair NER (TC-NER). GG-NER and TC-NER use different factors for recognizing DNA damage. However, they utilize the same machinery for lesion incision, repair, and ligation.

[1279] Once damage is recognized, the cell removes a short single-stranded DNA segment that contains the lesion. Endonucleases XPF/ERCC1 and XPG (encoded by ERCC5) remove the lesion by cutting the damaged strand on either side of the lesion, resulting in a single-strand gap of 22-30 nucleotides. Next, the cell performs DNA gap filling synthesis and ligation. Involved in this process are: PCNA, RFC, DNA Pol δ, DNA Pol ε or DNA Pol κ, and DNA ligase I or XRCC1/Ligase III. Replicating cells tend to use DNA pol ε and DNA ligase I, while non-replicating cells tend to use DNA Pol δ, DNA Pol κ, and the XRCC1/Ligase III complex to perform the ligation step.

[1280] NER can involve the following factors: XPA-G, POLH, XPF, ERCC1, XPA-G, and LIG1. Transcription-coupled NER (TC-NER) can involve the following factors: CSA, CSB, XPB, XPD, XPG, ERCC1, and TTDA. Additional factors that may promote the NER repair pathway include XPA-G, POLH, XPF, ERCC1, XPA-G, LIG1, CSA, CSB, XPA, XPB, XPC, XPD, XPF, XPG, TTDA, UVSSA, USP7, CETN2, RAD23B, UV-DDB, CAK subcomplex, RPA, and PCNA.

### Interstrand Crosslink (ICL)

[1281] A dedicated pathway called the ICL repair pathway repairs interstrand crosslinks. Interstrand crosslinks, or covalent crosslinks between bases in different DNA strand, can occur during replication or transcription. ICL repair involves the coordination of multiple repair processes, in particular, nucleolytic activity, translesion synthesis (TLS), and HDR. Nucleases are recruited to excise the ICL on either side of the crosslinked bases, while TLS and HDR are coordinated to repair the cut strands. ICL repair can involve the following factors: endonucleases, e.g., XPF and RAD51C, endonucleases such as RAD51, translesion polymerases, e.g., DNA polymerase zeta and Rev1), and the Fanconi anemia (FA) proteins, e.g., FancJ.

### Other Pathways

[1282] Several other DNA repair pathways exist in mammals.

[1283] Translesion synthesis (TLS) is a pathway for repairing a single stranded break left after a defective replication event and involves translesion polymerases, e.g., DNA pol □ and Rev1.

[1284] Error-free postreplication repair (PRR) is another pathway for repairing a single stranded break left after a defective replication event.

Examples of gRNAs in Genome Editing Methods

[1285] gRNA molecules as described herein can be used with Cas9 molecules that cleave both or a single strand to alter the sequence of a target nucleic acid, e.g., of a target position or target genetic signature. gRNA molecules useful in these method are described below.

[1286] In an embodiment, the gRNA, e.g., a chimeric gRNA, molecule is configured such that it comprises one or more of the following properties;

[1287] a) it can position, e.g., when targeting a Cas9 molecule that makes double strand breaks, a double strand break (i) within 50, 100, 150 or 200 nucleotides of a target position, or (ii) sufficiently close that the target position is within the region of end resection;

[1288] b) it has a targeting domain of at least 17 nucleotides, e.g., a targeting domain of (i) 17, (ii) 18, or (iii) 20 nucleotides; and

[1289] c)
[1290] (i) the proximal and tail domain, when taken together, comprise at least 15, 18, 20, 25, 30, 31, 35, 40, 45, 49, 50, or 53 nucleotides, e.g., at least 15, 18, 20, 25, 30, 31, 35, 40, 45, 49, 50, or 53 nucleotides from a naturally occurring S. pyogenes, S. thermophilus, S. aureus, or N. meningitidis tail and proximal domain, or a sequence that differs by no more than 1, 2, 3, 4, 5; 6, 7, 8, 9 or 10 nucleotides therefrom;
[1291] (ii) there are at least 15, 18, 20, 25, 30, 31, 35, 40, 45, 49, 50, or 53 nucleotides 3′ to the last nucleotide of the second complementarity domain, e.g., at least 15, 18, 20, 25, 30, 31, 35, 40, 45, 49, 50, or 53 nucleotides from the corresponding sequence of a naturally occurring S. pyogenes, S. thermophilus, S. aureus, or N. meningitidis gRNA, or a sequence that differs by no more than 1, 2, 3, 4, 5; 6, 7, 8, 9 or 10 nucleotides therefrom;
[1292] (iii) there are at least 16, 19, 21, 26, 31, 32, 36, 41, 46, 50, 51, or 54 nucleotides 3′ to the last nucleotide of the second complementarity domain that is complementary to its corresponding nucleotide of the first complementarity domain, e.g., at least 16, 19, 21, 26, 31, 32, 36, 41, 46, 50, 51, or 54 nucleotides from the corresponding sequence of a naturally occurring S. pyogenes, S. thermophilus, S. aureus, or N. meningitidis gRNA, or a sequence that differs by no more than 1, 2, 3, 4, 5, 6, 7, 8, 9 or 10 nucleotides therefrom;
[1293] iv) the tail domain is at least 10, 15, 20, 25, 30, 35 or 40 nucleotides in length, e.g., it comprises at least 10, 15, 20, 25, 30, 35 or 40 nucleotides from a naturally occurring S. pyogenes, S. thermophilus, S. aureus, or N. meningitidis tail domain; or, or a sequence that differs by no more than 1, 2, 3, 4, 5, 6, 7, 8, 9 or 10 nucleotides therefrom; or
[1294] (v) the tail domain comprises 15, 20, 25, 30, 35, 40 nucleotides or all of the corresponding portions of a naturally occurring tail domain, e.g., a naturally occurring S. pyogenes, S. thermophilus, S. aureus, or N. meningitidis tail domain.

[1295] In an embodiment, the gRNA molecule is configured such that it comprises properties: a(i); and b(i).

[1296] In an embodiment, the gRNA molecule is configured such that it comprises properties: a(i); and b(ii).

[1297] In an embodiment, the gRNA molecule is configured such that it comprises properties: a(i); and b(iii).

[1298] In an embodiment, the gRNA molecule is configured such that it comprises properties: a(ii); and b(i).

[1299] In an embodiment, the gRNA molecule is configured such that it comprises properties: a(ii); and b(ii).

[1300] In an embodiment, the gRNA molecule is configured such that it comprises properties: a(ii); and b(iii).

[1301] In an embodiment, the gRNA molecule is configured such that it comprises properties: b(i); and c(i).

[1302] In an embodiment, the gRNA molecule is configured such that it comprises properties: b(i); and c(ii).

[1303] In an embodiment, the gRNA molecule is configured such that it comprises properties: b(ii); and c(i).

[1304] In an embodiment, the gRNA molecule is configured such that it comprises properties: b(ii); and c(ii).

[1305] In an embodiment, the gRNA molecule is configured such that it comprises properties: b(iii); and c(i).

[1306] In an embodiment, the gRNA molecule is configured such that it comprises properties: b(iii); and c(ii).

[1307] In an embodiment, the gRNA is used with a Cas9 nickase molecule having HNH activity, e.g., a Cas9 molecule having the RuvC activity inactivated, e.g., a Cas9 molecule having a mutation at D10, e.g., the D10A mutation.

[1308] In an embodiment, the gRNA is used with a Cas9 nickase molecule having RuvC activity, e.g., a Cas9 molecule having the HNH activity inactivated, e.g., a Cas9 molecule having a mutation at H840, e.g., a H840A.

[1309] In an embodiment, the gRNA is used with a Cas9 nickase molecule having RuvC activity, e.g., a Cas9 molecule having the HNH activity inactivated, e.g., a Cas9 molecule having a mutation at H863, e.g., a H863A.

[1310] In an embodiment, a pair of gRNA molecules, e.g., a pair of chimeric gRNA molecules, comprising a first and a second gRNA molecule, is configured such that they comprises one or more of the following properties:

[1311] a) the first and second gRNA molecules position, e.g., when targeting a Cas9 molecule that makes single strand or double strand breaks:
[1312] (i) as positioned by a first and second gRNA molecule described herein; or
[1313] (ii) sufficiently close that the target position is altered when the break is repaired;

[1314] b) one or both, independently, has a targeting domain of at least 17 nucleotides, e.g., a targeting domain of (i) 17, (ii) 18, or (iii) 20 nucleotides; and

[1315] c) one or both, independently, has a the tail domain is (i) at least 10, 15, 20, 25, 30, 35 or 40 nucleotides in length or (ii) the tail domain comprises, 15, 20, 25, 30, 35, 40, or all of the corresponding portions of a naturally occurring tail domain, e.g., a naturally occurring S. pyogenes, S. aureus, or S. thermophilus tail domain.

[1316] In an embodiment, one or both of the gRNA molecules is configured such that it comprises properties: a(i); and b(i).

[1317] In an embodiment, one or both of the gRNA molecules is configured such that it comprises properties: a(i); and b(ii).

[1318] In an embodiment, one or both of the gRNA molecules is configured such that it comprises properties: a(i); and b(iii).

[1319] In an embodiment, one or both of the gRNA molecules is configured such that it comprises properties: a(ii); and b(i).

[1320] In an embodiment, one or both of the gRNA molecules is configured such that it comprises properties: a(ii); and b(ii).

[1321] In an embodiment, one or both of the gRNA molecules is configured such that it comprises properties: a(ii); and b(iii).

[1322] In an embodiment, one or both of the gRNA molecules is configured such that it comprises properties: b(i); and c(i).

[1323] In an embodiment, one or both of the gRNA molecules is configured such that it comprises properties: b(i); and c(ii).

[1324] In an embodiment, one or both of the gRNA molecules is configured such that it comprises properties: b(ii); and c(i).

[1325] In an embodiment, one or both of the gRNA molecules is configured such that it comprises properties: b(ii); and c(ii).

[1326] In an embodiment, one or both of the gRNA molecules is configured such that it comprises properties: b(iii); and c(i).

[1327] In an embodiment, one or both of the gRNA molecules is configured such that it comprises properties: b(iii); and c(ii).

[1328] In an embodiment the gRNA is used with a Cas9 nickase molecule having HNH activity, e.g., a Cas9 molecule having the RuvC activity inactivated, e.g., a Cas9 molecule having a mutation at D10, e.g., the D10A mutation.

[1329] In an embodiment, the gRNA is used with a Cas9 nickase molecule having RuvC activity, e.g., a Cas9 molecule having the HNH activity inactivated, e.g., a Cas9 molecule having a mutation at H840, e.g., a H840A.

[1330] In an embodiment the gRNA is used with a Cas9 nickase molecule having RuvC activity, e.g., a Cas9 molecule having the HNH activity inactivated, e.g., a Cas9 molecule having a mutation at H863, e.g., a H863A.

### Targets: Cells

[1331] Cas9 molecules and gRNA molecules, e.g., a Cas9 molecule/gRNA molecule complex, can be used to manipulate a cell, e.g., to edit a target nucleic acid, in a wide variety of cells.

[1332] In some embodiments, a cell is manipulated by altering one or more target genes, e.g., as described herein. In some embodiments, the expression of one or more target genes (e.g., one or more target genes described herein) is modulated, e.g., in vivo.

[1333] In an embodiment, the target cell is a retinal cell, e.g., a cell of the retinal pigment epithelium cell or a photoreceptor cell. In another embodiment, the target cell is a horizontal cell, a bipolar cell, an amacrine cell, or a ganglion cell. In an embodiment, the target cell is a cone photoreceptor cell or cone cell, a rod photoreceptor cell or rod cell, or a macular cone photoreceptor cell. In an exemplary embodiment, cone photoreceptors in the macula are targeted, i.e., cone photoreceptors in the macula are the target cells.

[1334] In an embodiment, the target cell is removed from the subject, the gene altered ex vivo, and the cell returned to the subject. In an embodiment, a photoreceptor cell is removed from the subject, the gene altered ex vivo, and the photoreceptor cell returned to the subject. In an embodiment, a cone photoreceptor cell is removed from the subject, the gene altered ex vivo, and the cone photoreceptor cell returned to the subject.

[1335] In an embodiment, the cells are induced pluripotent stem cells (iPS) cells or cells derived from iPS cells, e.g., iPS cells from the subject, modified to alter the gene and differentiated into retinal progenitor cells or retinal cells, e.g., retinal photoreceptors, and injected into the eye of the subject, e.g., subretinally, e.g., in the submacular region of the retina.

[1336] In an embodiment, the cells are targeted in vivo, e.g., by delivery of the components, e.g., a Cas9 molecule and a gRNA molecule, to the target cells. In an embodiment, the target cells are retinal pigment epithelium, photoreceptor cells, or a combination thereof. In an embodiment, AAV is used to deliver the components, e.g., a Cas9 molecule and a gRNA molecule, e.g., by transducing the target cells.

### VII. Delivery, Formulations and Routes of Administration

[1337] The components, e.g., a Cas9 molecule and gRNA molecule can be delivered, formulated, or administered in a variety of forms, see, e.g., Table 18. In an embodiment, one Cas9 molecule and two or more (e.g., 2, 3, 4, or more) different gRNA molecules are delivered, e.g., by an AAV vector. In an embodiment, the sequence encoding the Cas9 molecule and the sequence(s) encoding the two or more (e.g., 2, 3, 4, or more) different gRNA molecules are present on the same nucleic acid molecule, e.g., an AAV vector. When a Cas9 or gRNA component is delivered encoded in DNA the DNA will typically include a control region, e.g., comprising a promoter, to effect expression. Useful promoters for Cas9 molecule sequences include CMV, EFS, EF-1a, MSCV, PGK, CAG, hGRK1, hCRX, hNRL, and hRCVRN control promoters. In an embodiment, the promoter is a constitutive promoter. In another embodiment, the promoter is a tissue specific promoter. Exemplary promoter sequences are disclosed in Table 20. Useful promoters for gRNAs include H1, 7SK, and U6 promoters. Promoters with similar or dissimilar strengths can be selected to tune the expression of components. Sequences encoding a Cas9 molecule can comprise a nuclear localization signal (NLS), e.g., an SV40 NLS. In an embodiment, the sequence encoding a Cas9 molecule comprises at least two nuclear localization signals. In an embodiment a promoter for a Cas9 molecule or a gRNA molecule can be, independently, inducible, tissue specific, or cell specific. To detect the expression of a Cas9, an affinity tag can be used. Useful affinity tag sequences include, but are not limited to, 3×Flag tag, single Flag tag, HA tag, Myc tag or HIS tag. Exemplary affinity tag sequences are disclosed in Table 26. To regulate Cas9 expression, e.g., in mammalian cells, polyadenylation signals (poly(A) signals) can be used. Exemplary polyadenylation signals are disclosed in Table 27.

[1338] Table 18 provides examples of how the components can be formulated, delivered, or administered.

TABLE 18
Elements

| Cas9 | gRNA | |
|---|---|---|
| Molecule(s) | molecule(s) | Comments |
| DNA | DNA | In this embodiment a Cas9 molecule, |
| | | typically an eaCas9 molecule, and a |
| | | gRNA are transcribed from DNA. |
| | | In this embodiment they are encoded |
| | | on separate molecules. |
| DNA | | In this embodiment a Cas9 molecule, |
| | | typically an eaCas9 molecule, and a |
| | | gRNA are transcribed from DNA, |
| | | here from a single molecule. |
| DNA | RNA | In this embodiment a Cas9 molecule, |
| | | typically an eaCas9 molecule, is |
| | | transcribed from DNA. |
| mRNA | RNA | In this embodiment a Cas9 molecule, |
| | | typically an eaCas9 molecule, is |
| | | transcribed from DNA. |
| Protein | DNA | In this embodiment a Cas9 molecule, |
| | | typically an eaCas9 molecule, is |
| | | provided as a protein. A gRNA is |
| | | transcribed from DNA. |
| Protein | RNA | In this embodiment an eaCas9 |
| | | molecule is provided as a protein. |

[1339] Table 19 summarizes various delivery methods for the components of a Cas system, e.g., the Cas9 molecule component and the gRNA molecule component, as described herein.

TABLE 19

| | | Delivery | | | |
|---|---|---|---|---|---|
| | | into Non- | Duration | | Type of |
| | | Dividing | of Ex- | Genome | Molecule |
| Delivery Vector/Mode | | Cells | pression | Integration | Delivered |
| Physical (e.g., | | YES | Transient | NO | Nucleic |
| electroporation, | | | | | Acids and |
| particle gun, Calcium | | | | | Proteins |
| Phosphate transfection) | | | | | |
| Viral | Retrovirus | NO | Stable | YES | RNA |
| | Lentivirus | YES | Stable | YES/NO | RNA |
| | | | | with modi- | |
| | | | | fications | |
| | Adenovirus | YES | Transient | NO | DNA |
| | Adeno- | YES | Stable | NO | DNA |
| | Associated | | | | |
| | Virus | | | | |
| | (AAV) | | | | |
| | Vaccinia | YES | Very | NO | DNA |
| | Virus | | Transient | | |
| | Herpes | YES | Stable | NO | DNA |
| | Simplex | | | | |
| | Virus | | | | |
| Non- | Cationic | YES | Transient | Depends | Nucleic |
| Viral | Liposomes | | | on what is | Acids and |
| | | | | delivered | Proteins |
| | Polymeric | YES | Transient | Depends | Nucleic |
| | Nanoparticles | | | on what is | Acids and |
| | | | | delivered | Proteins |
| Biological | Attenuated | YES | Transient | NO | Nucleic |
| Non- | Bacteria | | | | Acids |
| Viral | Engineered | YES | Transient | NO | Nucleic |
| Delivery | Bacteriophages | | | | Acids |
| Vehicles | Mammalian | YES | Transient | NO | Nucleic |
| | Virus-like | | | | Acids |
| | Particles | | | | |
| | Biological | YES | Transient | NO | Nucleic |
| | liposomes: | | | | Acids |
| | Erythrocyte | | | | |
| | Ghosts and | | | | |
| | Exosomes | | | | |

[1340] Table 20 describes exemplary promoter sequences that can be used in AAV vectors, e.g., for Cas9 expression.

TABLE 20
Cas9 Promoter Sequences

| Promoter | Length (bp) | DNA Sequence |
|---|---|---|
| CMV | 617 | SEQ ID NO: 401 |
| EFS | 252 | SEQ ID NO: 402 |
| Human GRK1 | 292 | SEQ ID NO: 403 |
| (rhodopsin kinase) | | |
| Human CRX (cone | 113 | SEQ ID NO: 404 |
| rod homeobox | | |
| transcription factor) | | |
| Human NRL (neural | 281 | SEQ ID NO: 405 |
| retina leucine zipper | | |
| transcription factor | | |
| enhance upstream of | | |
| the human TK | | |
| terminal promoter) | | |
| Human RCVRN | 235 | SEQ ID NO: 406 |
| (recoverin) | | |

[1341] Table 26 describes exemplary affinity tag sequences that can be used in AAV vectors, e.g., for Cas9 expression.

TABLE 26

| Affinity tag | Amino Acid Sequence |
|---|---|
| 3XFlag tag | DYKDHDGDYKDHDIDYKDDDDK |
| | (SEQ ID NO: 426) |
| Flag tag (single) | DYKDDDDK (SEQ ID NO: 451) |
| HA tag | YPYDVPDYA (SEQ ID NO: 452) |
| Myc tag | EQKLISEEDL (SEQ ID NO: 453) |
| HIS tag | HHHHHH (SEQ ID NO: 454) |

[1342] Table 27 describes exemplary polyadenylation (polyA) sequences that can be used in AAV vectors, e.g., for Cas9 expression.

TABLE 27
Exemplary PolyA Sequences

| PolyA | DNA sequence |
|---|---|
| Mini polyA | SEQ ID NO: 424 |
| bGH polyA | SEQ ID NO: 455 |
| SV40 polyA | SEQ ID NO: 456 |

[1343] Table 25 describes exemplary Inverted Terminal Repeat (ITR) sequences that can be used in AAV vectors.

TABLE 25
Sequences of ITRs from Exemplary AAV Serotypes

| AAV | | |
|---|---|---|
| Serotype | Left ITR Sequence | Right ITR Sequence |
| AAV1 | SEQ ID NO: 407 | SEQ ID NO: 436 |
| AAV2 | SEQ ID NO: 408 | SEQ ID NO: 437 |
| AAV3B | SEQ ID NO: 409 | SEQ ID NO: 438 |
| AAV4 | SEQ ID NO: 410 | SEQ ID NO: 439 |
| AAV5 | SEQ ID NO: 411 | SEQ ID NO: 440 |
| AAV6 | SEQ ID NO: 412 | SEQ ID NO: 441 |
| AAV7 | SEQ ID NO: 413 | SEQ ID NO: 442 |
| AAV8 | SEQ ID NO: 414 | SEQ ID NO: 443 |
| AAV9 | SEQ ID NO: 415 | SEQ ID NO: 444 |

[1344] Additional exemplary sequences for the recombinant AAV genome components described herein are provided below.

[1345] Exemplary left and right ITR sequences are provided in Table 25 (SEQ ID NOs: 407-415 and 436-444).

Exemplary spacer 1 sequence:

(SEQ ID NO: 416)

CAGATCTGAATTCGGTACC.
Exemplary U6 promoter sequence:

(SEQ ID NO: 417)

AAGGTCGGGCAGGAAGAGGGCCTATTTCCCATGATTCCTTCATATTTGCA
TATACGATACAAGGCTGTTAGAGAGATAATTAGAATTAATTTGACTGTAA
ACACAAAGATATTAGTACAAAATACGTGACGTAGAAAGTAATAATTTCTT
GGGTAGTTTGCAGTTTTAAAATTATGTTTTAAAATGGACTATCATATGCT
TACCGTAACTTGAAAGTATTTCGATTTCTTGGCTTTATATATCTTGTGGA
AAGGACGAAACACC

[1346] Exemplary gRNA targeting domain sequences are described herein, e.g., in Tables 2A-2D, Tables 3A-3C, Tables 4A-4D, Tables 5A-5D, Tables 6A-6B, Tables 7A-7D, Tables 8A-8D, Tables 9A-9E, Tables 10A-10B, or Table 11.

Exemplary gRNA scaffold domain sequence:

(SEQ ID NO: 418)

GTTTTAGTACTCTGGAAACAGAATCTACTAAAACAAGGCAAAATGCCGTG
TTTATCTCGTCAACTTGTTGGCGAGATTTTTT.
Exemplary spacer 2 domain sequence:

(SEQ ID NO: 419)

GGTACCGCTAGCGCTTAAGTCGCGATGTACGGGCCAGATATACGCGT
TGA.
Exemplary Polymerase II promoter sequences are
provided in Table 20.
Exemplary N-ter NLS nucleotide sequence:

(SEQ ID NO: 420)

CCGAAGAAAAAGCGCAAGGTCGAAGCGTCC
Exemplary N-ter NLS amino acid sequence:

(SEQ ID NO: 434)

PKKKRKV
Exemplary S. aureus Cas9 nucleotide sequence
set forth in SEQ ID NO: 39.
Exemplary S. aureus Cas9 amino acid sequence
set forth in SEQ ID NO: 26.
Exemplary C-ter NLS sequence:

(SEQ ID NO: 422)

CCCAAGAAGAAGAGGAAAGTC.
Exemplary C-ter NLS amino acid sequence:

(SEQ ID NO: 434)

PKKKRKV
Exemplary poly(A) signal sequence:

(SEQ ID NO: 424)

TAGCAATAAAGGATCGTTTATTTTCATTGGAAGCGTGTGTTGGTTTTTTG
ATCAGGCGCG.
Exemplary Spacer 3 sequence:

(SEQ ID NO: 425)

TCCAAGCTTCGCAGGAAAGAACATGTGAGCAAAAGGCCAGCAAAAGGCGT
TAACTCTAGATTTAAATGCATGCTGGGGAGAGATCT
Exemplary 3xFLAG nucleotide sequence:

(SEQ ID NO: 423)

GACTACAAAGACCATGACGGTGATTATAAAGATCATGACATCGATTACAA
GGATGACGATGACAAG.
Exemplary 3xFLAG amino acid sequence:

(SEQ ID NO: 426)

DYKDHDGDYKDHDIDYKDDDDK
Exemplary Spacer 4 sequence:

(SEQ ID NO: 427)

CGACTTAGTTCGATCGAAGG.

[1347] Exemplary recombinant AAV genome sequences are provided in FIGS. 19A-24F (SEQ ID NOs: 428-433 and 445-450). Exemplary sequences of the recombinant AAV genome components (e.g., one or more of the components described above) are also shown in FIGS. 19A-24F (SEQ ID NOs: 428-433 and 445-450).

[1348] In certain aspects, the present disclosure focuses on AAV vectors encoding CRISPR/Cas9 genome editing systems, and on the use of such vectors to treat CEP290 associated disease. Exemplary AAV vector genomes are schematized in FIGS. 25A through 25D, which illustrate certain fixed and variable elements of these vectors: inverted terminal repeats (ITRs), one or two gRNA sequences and promoter sequences to drive their expression, a Cas9 coding sequence and another promoter to drive its expression. Each of these elements is discussed in detail below.

[1349] Turning first to the gRNA pairs utilized in the nucleic acids or AAV vectors of the present disclosure, one of three “left” or “upstream” guides may be used to cut upstream (between exon 26 and the IVS26 mutation), and one of three “right” or “downstream” guides is used to cut downstream (between the IVS26 mutation and exon 27). Targeting domain sequences of these guides (both DNA and RNA sequences) are presented in Table 28, below:

TABLE 28
Upstream (left) and Downstream (right) gRNA
Targeting Domain Sequences

| | | | |
|---|---|---|---|
| SEQ | | SEQ | |
| ID | | ID | |
| NO: | DNA | NO: | RNA |

Upstream (left) guides

| | | | |
|---|---|---|---|
| 389 | GTTCTGTCCTCAGTAAAAGG | 530 | GUUCUGUCCUCAGUAAAAGGUA |
| | TA | | |
| 390 | GAATAGTTTGTTCTGGGTAC | 468 | GAAUAGUUUGUUCUGGGUAC |
| 391 | GAGAAAGGGATGGGCACTTA | 538 | GAGAAAGGGAUGGGCACUUA |

Downstream (right) guides

| | | | |
|---|---|---|---|
| 388 | GTCAAAAGCTACCGGTTACC | 558 | GUCAAAAGCUACCGGUUACCUG |
| | TG | | |
| 392 | GATGCAGAACTAGTGTAGAC | 460 | GAUGCAGAACUAGUGUAGAC |
| 394 | GAGTATCTCCTGTTTGGCA | 568 | GAGUAUCUCCUGUUUGGCA |

[1350] The left and right guides can be used in any combination, though certain combinations may be more suitable for certain applications. Table 29 sets forth several upstream+downstream guide pairs used in the embodiments of this disclosure. It should be noted, notwithstanding the use of “left” and “right” as nomenclature for gRNAs, that any guide in a pair, upstream or downstream, may be placed in either one of the gRNA coding sequence positions illustrated in FIG. 25.

TABLE 29
Upstream (Left) + Downstream (Right) Guide Pairs by SEQ ID NO.

| | | Downstream | | |
|---|---|---|---|---|
| | | 388 | 392 | 394 |
| Upstream | 389 | 389 + 388 | 389 + 392 | 389 + 394 |
| | 390 | 390 + 388 | 390 + 392 | 390 + 394 |
| | 391 | 391 + 388 | 391 + 392 | 391 + 394 |
| | 530 | 530 + 558 | 530 + 460 | 530 + 568 |
| | 468 | 468 + 558 | 468 + 460 | 468 + 568 |
| | 538 | 538 + 558 | 538 + 460 | 538 + 568 |

[1351] In some embodiments, the gRNAs used in the present disclosure are derived from S. aureus gRNAs and can be unimolecular or modular, as described below. An exemplary unimolecular S. aureus gRNA is shown in FIG. 18B, and exemplary DNA and RNA sequences corresponding to unimolecular S. aureus gRNAs are shown below:

(SEQ ID NO: 2785)

DNA: [N]₁₆₋₂₄
GTTTTAGTACTCTGGAAACAGAATCTACTAAAACAAGGCAAAATGCCGTG
TTTATCTCGTCAACTTGTTGGCGAGATTTTTT
and

(SEQ ID NO: 2779)

RNA: [N]₁₆₋₂₄
GUUUUAGUACUCUGGAAACAGAAUCUACUAAAACAAGGCAAAAUGCCGUG
UUUAUCUCGUCAACUUGUUGGCGAGAUUUUUU.

(SEQ ID NO: 2787)

DNA: [N]₁₆₋₂₄
GTTATAGTACTCTGGAAACAGAATCTACTATAACAAGGCAAAATGCCGTG
TTTATCTCGTCAACTTGTTGGCGAGATTTTTT
and

(SEQ ID NO: 2786)

RNA: [N]₁₆₋₂₄
GUUAUAGUACUCUGGAAACAGAAUCUACUAUAACAAGGCAAAAUGCCGUG
UUUAUCUCGUCAACUUGUUGGCGAGAUUUUUU.

[1352] It should be noted that, while the figure depicts a targeting domain of 20 nucleotides, the targeting domain can have any suitable length. gRNAs used in the various embodiments of this disclosure preferably include targeting domains of between 16 and 24 (inclusive) bases in length at their 5′ ends, and optionally include a 3′ U6 termination sequence as illustrated.

[1353] The gRNA in FIG. 18B is depicted as unimolecular, but in some instances modular guides can be used. In the exemplary unimolecular gRNA sequences above, a 5′ portion corresponding to a crRNA (underlined) is connected by a GAAA linker to a 3′ portion corresponding to a tracrRNA (double underlined). Skilled artisans will appreciate that two-part modular gRNAs can be used that correspond to the underlined and double underlined sections.

[1354] Either one of the gRNAs presented above can be used with any of targeting sequences SEQ ID NOs: 389-391, 388, 392, or 394, and two gRNAs in a pair do not necessarily include the same backbone sequence. Additionally, skilled artisans will appreciate that the exemplary gRNA designs set forth herein can be modified in a variety of ways, which are described below or are known in the art; the incorporation of such modifications is within the scope of this disclosure.

[1355] Expression of each of the gRNAs in the AAV vector is driven by a pair of U6 promoters, such as a human U6 promoter. An exemplary U6 promoter sequence, as set forth in Maeder, is SEQ ID NO: 417.

[1356] Turning next to Cas9, in some embodiments the Cas9 protein is S. aureus Cas9. In further embodiments of this disclosure an S. aureus Cas9 sequence is modified to include two nuclear localization sequences (NLSs) at the C- and N-termini of the Cas9 protein, and a mini-polyadenylation signal (or Poly-A sequence). Exemplary S. aureus Cas9 sequences are provided as SEQ ID NO: 39 (i.e., codon-optimized S. aureus Cas9 nucleotide sequence) and SEQ ID NO: 26 (i.e., S. aureus Cas9 protein sequence). These sequences are exemplary in nature, and are not intended to be limiting. The skilled artisan will appreciate that modifications of these sequences may be possible or desirable in certain applications; such modifications are described below, or are known in the art, and are within the scope of this disclosure.

[1357] Skilled artisans will also appreciate that polyadenylation signals are widely used and known in the art, and that any suitable polyadenylation signal can be used in the embodiments of this disclosure. One exemplary polyadenylation signal is set forth in SEQ ID NO: 424.

[1358] Cas9 expression is driven, in certain vectors of this disclosure, by one of three promoters: cytomegalovirus (CMV) (i.e., SEQ ID NO: 401), elongation factor-1 (EFS) (i.e., SEQ ID NO: 402), or human g-protein receptor coupled kinase-1 (hGRK1) (i.e., SEQ ID NO: 403), which is specifically expressed in retinal photoreceptor cells. Modifications of the sequences of the promoters may be possible or desirable in certain applications, and such modifications are within the scope of this disclosure.

[1359] AAV genomes according to the present disclosure generally incorporate inverted terminal repeats (ITRs) derived from the AAV2 serotype. Exemplary left and right ITRs are SEQ ID NO: 408 (AAV2 Left ITR) and SEQ ID NO: 437 (AAV2 Right ITR), respectively. It should be noted, however, that numerous modified versions of the AAV2 ITRs are used in the field, and the ITR sequences shown below are exemplary and are not intended to be limiting. Modifications of these sequences are known in the art, or will be evident to skilled artisans, and are thus included in the scope of this disclosure.

[1360] As FIG. 25 illustrates, the gRNA pairs and the Cas9 promoter are variable and can be selected from the lists presented above. For clarity, this disclosure encompasses nucleic acids and/or AAV vectors comprising any combination of these elements, though certain combinations may be preferred for certain applications. Accordingly, in various embodiments of this disclosure, a nucleic acid or AAV vector encodes a CMV promoter for the Cas9, and gRNAs comprising targeting domains according to SEQ ID NOs: 389 and 388 (RNA sequences are SEQ ID NOs: 530 and 558, respectively); a CMV promoter and gRNAs comprising targeting domains according to SEQ ID NOs: 389 and 392 (RNA sequences are SEQ ID NOs: 530 and 460, respectively); a CMV promoter and gRNAs comprising targeting domains according to SEQ ID NOs: 389 and 394 (RNA sequences are SEQ ID NOs: 530 and 568, respectively); a CMV promoter and gRNAs comprising targeting domains according to SEQ ID NOs: 390 and 388 (RNA sequences are SEQ ID NOs: 468 and 558, respectively); a CMV promoter and gRNAs comprising targeting domains according to SEQ ID NOs: 390 and 392 (RNA sequences are SEQ ID NOs: 468 and 460, respectively); a CMV promoter and gRNAs comprising targeting domains according to SEQ ID NOs: 390 and 394 (RNA sequences are SEQ ID NOs: 468 and 568, respectively); a CMV promoter and gRNAs comprising targeting domains according to SEQ ID NOs: 391 and 388 (RNA sequences are SEQ ID NOs: 538 and 558, respectively); a CMV promoter and gRNAs comprising targeting domains according to SEQ ID NOs: 391 and 392 (RNA sequences are SEQ ID NOs: 538 and 460, respectively); a CMV promoter and gRNAs comprising targeting domains according to SEQ ID NOs: 391 and 394 (RNA sequences are SEQ ID NOs: 538 and 568, respectively); an EFS promoter and gRNAs comprising targeting domains according to SEQ ID NOs: 389 and 388 (RNA sequences are SEQ ID NOs: 530 and 558, respectively); an EFS promoter and gRNAs comprising targeting domains according to SEQ ID NOs: 389 and 392 (RNA sequences are SEQ ID NOs: 530 and 460, respectively); an EFS promoter and gRNAs comprising targeting domains according to SEQ ID NOs: 389 and 394 (RNA sequences are SEQ ID NOs: 530 and 568, respectively); an EFS promoter and gRNAs comprising targeting domains according to SEQ ID NOs: 390 and 388 (RNA sequences are SEQ ID NOs: 468 and 558, respectively); an EFS promoter and gRNAs comprising targeting domains according to SEQ ID NOs: 390 and 392 (RNA sequences are SEQ ID NOs: 468 and 460, respectively); an EFS promoter and gRNAs comprising targeting domains according to SEQ ID NOs: 390 and 394 (RNA sequences are SEQ ID NOs: 468 and 568, respectively); an EFS promoter and gRNAs comprising targeting domains according to SEQ ID NOs: 391 and 388 (RNA sequences are SEQ ID NOs: 538 and 558, respectively); an EFS promoter and gRNAs comprising targeting domains according to SEQ ID NOs: 391 and 392 (RNA sequences are SEQ ID NOs: 538 and 460, respectively); an EFS promoter and gRNAs comprising targeting domains according to SEQ ID NOs: 391 and 394 (RNA sequences are SEQ ID NOs: 538 and 568, respectively); an hGRK1 promoter and gRNAs comprising targeting domains according to SEQ ID NOs: 389 and 388 (RNA sequences are SEQ ID NOs: 530 and 558, respectively); an hGRK1 promoter and gRNAs comprising targeting domains according to SEQ ID NOs: 389 and 392 (RNA sequences are SEQ ID NOs: 530 and 460, respectively); an hGRK1 promoter and gRNAs comprising targeting domains according to SEQ ID NOs: 389 and 394 (RNA sequences are SEQ ID NOs: 530 and 568, respectively); an hGRK1 promoter and gRNAs comprising targeting domains according to SEQ ID NOs: 390 and 388 (RNA sequences are SEQ ID NOs: 468 and 558, respectively); an hGRK1 promoter and gRNAs comprising targeting domains according to SEQ ID NOs: 390 and 392 (RNA sequences are SEQ ID NOs: 468 and 460, respectively); an hGRK1 promoter and gRNAs comprising targeting domains according to SEQ ID NOs: 390 and 394 (RNA sequences are SEQ ID NOs: 468 and 568, respectively); an hGRK1 promoter and gRNAs comprising targeting domains according to SEQ ID NOs: 391 and 388 (RNA sequences are SEQ ID NOs: 538 and 558, respectively); an hGRK1 promoter and gRNAs comprising targeting domains according to SEQ ID NOs: 391 and 392 (RNA sequences are SEQ ID NOs: 538 and 460, respectively); or an hGRK1 promoter and gRNAs comprising targeting domains according to SEQ ID NOs: 391 and 394 (RNA sequences are SEQ ID NOs: 538 and 568, respectively).

[1361] In various embodiments, the nucleic acid or AAV vector encodes the following: left and right AAV2 ITR sequences, a first U6 promoter to drive expression of a first guide RNA having a sequence selected from SEQ ID NOs: 2785 and 2787 and/or comprising a targeting domain sequence according to one of SEQ ID NOs: 389-391, a second U6 promoter to drive expression of a second guide RNA comprising a sequence selected from SEQ ID NOs: 2785 and 2787 and/or comprising a targeting domain sequence according to one of SEQ ID NOs: 388, 392, and 394, and a CMV promoter to drive expression of an S. aureus Cas9 encoded by SEQ ID NO: 39; or left and right AAV2 ITR sequences, a first U6 promoter to drive expression of a first guide RNA having a sequence selected from SEQ ID NOs: 2785 or 2787 and/or comprising a targeting domain sequence according to one of SEQ ID NOs: 389-391, a second U6 promoter to drive expression of a second guide RNA comprising a sequence selected from SEQ ID NOs: 2785 and 2787 and/or comprising a targeting domain sequence according to one of SEQ ID NOs: 388, 392, and 394, and an hGRK promoter to drive expression of an S. aureus Cas9 encoded by SEQ ID NO: 39; or left and right AAV2 ITR sequences, a first U6 promoter to drive expression of a first guide RNA having a sequence selected from SEQ ID NOs: 2785 and 2787 and/or comprising a targeting domain sequence according to one of SEQ ID NOs: 389-391, a second U6 promoter to drive expression of a second guide RNA comprising a sequence selected from SEQ ID NOs: 2785 or 2787 and/or comprising a targeting domain sequence according to one of SEQ ID NOs: 388, 392, and 394, and an EFS promoter to drive expression of an S. aureus Cas9 encoded by SEQ ID NO: 39.

[1362] As shown in FIG. 25D, the nucleic acid or AAV vector may also comprise a Simian virus 40 (SV40) splice donor/splice acceptor (SD/SA) sequence element. In certain embodiments, the SV40 SD/SA element may be positioned between the GRK1 promoter and the Cas9 gene. In certain embodiments, a Kozak consensus sequence may precede the start codon of Cas9 to ensure robust Cas9 expression.

[1363] In some embodiments, the nucleic acid or AAV vector shares at least 80%, 85%, 90%, 95%, 96%, 97%, 98%, 99% or greater sequence identity with one of the nucleic acids or AAV vectors recited above.

[1364] It should be noted that these sequences described above are exemplary, and can be modified in ways that do not disrupt the operating principles of elements they encode. Such modifications, some of which are discussed below, are within the scope of this disclosure. Without limiting the foregoing, skilled artisans will appreciate that the DNA, RNA or protein sequences of the elements of this disclosure may be varied in ways that do not interrupt their function, and that a variety of similar sequences that are substantially similar (e.g., greater than 90%, 95%, 96%, 97%, 98% or 99% sequence similarity, or in the case of short sequences such as gRNA targeting domains, sequences that differ by no more than 1, 2 or 3 nucleotides) can be utilized in the various systems, methods and AAV vectors described herein. Such modified sequences are within the scope of this disclosure.

[1365] The AAV genomes described above can be packaged into AAV capsids (for example, AAV5 capsids), which capsids can be included in compositions (such as pharmaceutical compositions) and/or administered to subjects. An exemplary pharmaceutical composition comprising an AAV capsid according to this disclosure can include a pharmaceutically acceptable carrier such as balanced saline solution (BSS) and one or more surfactants (e.g., Tween20) and/or a thermosensitive or reverse-thermosensitive polymer (e.g., pluronic). Other pharmaceutical formulation elements known in the art may also be suitable for use in the compositions described here.

[1366] Compositions comprising AAV vectors according to this disclosure can be administered to subjects by any suitable means, including without limitation injection, for example, subretinal injection. The concentration of AAV vector within the composition is selected to ensure, among other things, that a sufficient AAV dose is administered to the retina of the subject, taking account of dead volume within the injection apparatus and the relatively limited volume that can be safely administered to the retina. Suitable doses may include, for example, 1×10¹¹ viral genomes (vg)/mL, 2×10¹¹ viral genomes (vg)/mL, 3×10¹¹ viral genomes (vg)/mL, 4×10¹¹ viral genomes (vg)/mL, 5×10¹¹ viral genomes (vg)/mL, 6×10¹¹ viral genomes (vg)/mL, 7×10¹¹ viral genomes (vg)/mL, 8×10¹¹ viral genomes (vg)/mL, 9×10¹¹ viral genomes (vg)/mL, 1×10¹² vg/mL, 2×10¹² viral genomes (vg)/mL, 3×10¹² viral genomes (vg)/mL, 4×10¹² viral genomes (vg)/mL, 5×10¹² viral genomes (vg)/mL, 6×10¹² viral genomes (vg)/mL, 7×10¹² viral genomes (vg)/mL, 8×10¹² viral genomes (vg)/mL, 9×10¹² viral genomes (vg)/mL, 1×10¹³ vg/mL, 2×10¹³ viral genomes (vg)/mL, 3×10¹³ viral genomes (vg)/mL, 4×10¹³ viral genomes (vg)/mL, 5×10¹³ viral genomes (vg)/mL, 6×10¹³ viral genomes (vg)/mL, 7×10¹³ viral genomes (vg)/mL, 8×10¹³ viral genomes (vg)/mL, or 9×10¹³ viral genomes (vg)/mL. Any suitable volume of the composition may be delivered to the subretinal space. In some instances, the volume is selected to form a bleb in the subretinal space, for example 1 microliter, 10 microliters, 50 microliters, 100 microliters, 150 microliters, 200 microliters, 250 microliters, 300 microliters, etc. Any region of the retina may be targeted, though the fovea (which extends approximately 1 degree out from the center of the eye) may be preferred in certain instances due to its role in central visual acuity and the relatively high concentration of cone photoreceptors there relative to peripheral regions of the retina. Alternatively or additionally, injections may be targeted to parafoveal regions (extending between approximately 2 and 10 degrees off center), which are characterized by the presence of all three types of retinal photoreceptor cells. In addition, injections into the parafoveal region may be made at comparatively acute angles using needle paths that cross the midline of the retina. For instance, injection paths may extend from the nasal aspect of the sclera near the limbus through the vitreal chamber and into the parafoveal retina on the temporal side, from the temporal aspect of the sclera to the parafoveal retina on the nasal side, from a portion of the sclera located superior to the cornea to an inferior parafoveal position, and/or from an inferior portion of the sclera to a superior parafoveal position. The use of relatively small angles of injection relative to the retinal surface may advantageously reduce or limit the potential for spillover of vector from the bleb into the vitreous body and, consequently, reduce the loss of the vector during delivery. In other cases, the macula (inclusive of the fovea) can be targeted, and in other cases, additional retinal regions can be targeted, or can receive spillover doses.

[1367] To mitigate ocular inflammation and associated discomfort, one or more corticosteroids may be administered before, during, and/or after administration of the composition comprising AAV vectors. In certain embodiments, the corticosteroid may be an oral corticosteroid. In certain embodiments, the oral corticosteroid may be prednisone. In certain embodiments, the corticosteroid may be administered as a prophylactic, prior to administration of the composition comprising AAV vectors. For example, the corticosteroid may be administered the day prior to administration, or 2 days, 3 days, 4 days, 5 days, 6 days, 7 days, 8 days, 9 days, 10 days, 11 days, 12 days, 13 days, or 14 days prior to administration of the composition comprising AAV vectors. In certain embodiments, the corticosteroid may be administered for 1 week to 10 weeks after administration of the composition comprising AAV vectors (e.g., 1 week, 2 weeks, 3 weeks, 4 weeks, 5 weeks, 6 weeks, 7 weeks, 8 weeks, 9 weeks, or 10 weeks after administration of the composition comprising AAV vectors). In certain embodiments, the corticosteroid treatment may be administered prior to (e.g., the day prior to administration, or 2 days, 3 days, 4 days, 5 days, 6 days, 7 days, 8 days, 9 days, 10 days, 11 days, 12 days, 13 days, or 14 days prior to administration) and after administration of the composition comprising AAV vectors (e.g., 1 week, 2 weeks, 3 weeks, 4 weeks, 5 weeks, 6 weeks, 7 weeks, 8 weeks, 9 weeks, or 10 weeks after administration). For example, the corticosteroid treatment may be administered beginning 3 days prior to until 6 weeks after administration of the AAV vector.

[1368] Suitable doses of corticosteroids may include, for example, 0.1 mg/kg/day to 10 mg/kd/day (e.g., 0.1 mg/kg/day, 0.2 mg/kg/day, 0.3 mg/kg/day, 0.4 mg/kg/day, 0.5 mg/kg/day, 0.6 mg/kg/day, 0.7 mg/kg/day, 0.8 mg/kg/day, 0.9 mg/kg/day, or 1.0 mg/kg/day). In certain embodiments, the corticosteroid may be administered at an elevated dose during the corticosteroid treatment, followed by a tapered dose of the corticosteroid. For example, 0.5 mg/kg/day corticosteroid may be administered for 4 weeks, followed by a 15-day taper (0.4 mg/kg/day for 5 days, and then 0.2 mg/kg/day for 5 days, and then 0.1 mg/kg/day for 5 days). The corticosteroid dose may be increased if there is an increase in vitreous inflammation by 1+ on the grading scale following surgery (e.g., within 4 weeks after surgery). For example, if there is an increase in vitreous inflammation by 1+ on the grading scale while the patient is receiving a 0.5 mg/kg/day dose (e.g., within 4 weeks after surgery), the corticosteroid dose may be may be increased to 1 mg/kg/day. If any inflammation is present within 4 weeks after surgery, the taper may be delayed.

[1369] For pre-clinical development purposes, systems, compositions, nucleotides and vectors according to this disclosure can be evaluated ex vivo using a retinal explant system, or in vivo using an animal model such as a mouse, rabbit, pig, nonhuman primate, etc. Retinal explants are optionally maintained on a support matrix, and AAV vectors can be delivered by injection into the space between the photoreceptor layer and the support matrix, to mimic subretinal injection. Tissue for retinal explantation can be obtained from human or animal subjects, for example mouse.

[1370] Explants are particularly useful for studying the expression of gRNAs and/or Cas9 following viral transduction, and for studying genome editing over comparatively short intervals. These models also permit higher throughput than may be possible in animal models, and can be predictive of expression and genome editing in animal models and subjects. Small (mouse, rat) and large animal models (such as rabbit, pig, nonhuman primate) can be used for pharmacological and/or toxicological studies and for testing the systems, nucleotides, vectors and compositions of this disclosure under conditions and at volumes that approximate those that will be used in clinic. Because model systems are selected to recapitulate relevant aspects of human anatomy and/or physiology, the data obtained in these systems will generally (though not necessarily) be predictive of the behavior of AAV vectors and compositions according to this disclosure in human and animal subjects.

[1371] While the foregoing exemplary embodiments have focused on guide RNAs, nucleic acids and AAV vectors targeted to the CEP290 gene, it will be appreciated by those of skill in the art that the nucleic acids and vectors of this disclosure may be used in the editing of other gene targets and the treatment of other diseases such as hereditary retinopathies that may be treated by editing of genes other than CEP290. In certain embodiments, it is contemplated that the same configuration of the nucleic acids or AAV vectors disclosed herein may be used to treat other inherited retinal diseases by modifying the gRNA targeting domains to target and alter the gene of interest.

[1372] FIGS. 25A-25D illustrate exemplary AAV vectors that may be used to transduce retinal cells, including without limitation retinal photoreceptor cells such as rod photoreceptors and/or cone photoreceptors, and/or other retinal cell types. The AAV genome of FIG. 25A comprises two guide RNAs comprising targeting domains according to one of the guide pairs of SEQ ID NOs: 389 and 388, SEQ ID NOs: 389 and 392, SEQ ID NOs: 389 and 394, SEQ ID NOs: 390 and 388, SEQ ID NOs: 390 and 392, SEQ ID NOs: 390 and 394, SEQ ID NOs: 391 and 388, SEQ ID NOs: 391 and 392, SEQ ID NOs: 391 and 394, and a promoter sequence according to one of CMV, EFS, hGRK1 driving expression of an S. aureus Cas9 comprising one or two nuclear localization signals and a polyadenylation signal. The vector may additionally include ITRs such as AAV2 ITRs, or other sequences that may be selected for the specific application to which the vector will be employed. A more detailed version of FIG. 25A is shown in FIG. 25D, illustrating that the AAV genome may also comprise a Simian virus 40 (SV40) splice donor/splice acceptor (SD/SA) sequence element. In certain embodiments, the SV40 SD/SA element may be positioned between the promoter and the Cas9 gene. In certain embodiments, a Kozak consensus sequence may precede the start codon of Cas9. The AAV genome of FIG. 25B comprises two guide RNAs according to SEQ ID NOs: 2785 or 2787, and a promoter sequence according to one of SEQ ID NOs: 401-403 driving expression of an S. aureus Cas9 comprising one or two nuclear localization signals and, optionally, a polyadenylation signal. The vector may additionally include ITRs such as AAV2 ITRs, or other sequences that may be selected for the specific application to which the vector will be employed. As is shown in FIG. 25C, other vectors within the scope of this disclosure may include only 1 guide RNA. Thus, in specific embodiments, an AAV genome of this disclosure may encode a CMV promoter for the Cas9 and one guide RNA having a sequence comprising, or sharing at least 90% sequence identity with, a sequence selected from SEQ ID NOs: 2785 and 2787; a CMV promoter for the Cas9 and two guide RNAs, each having a sequence comprising, or sharing at least 90% sequence identity with, a sequence selected from SEQ ID NOs: 2785 and 2787; an hGRK promoter for the Cas9 and one guide RNA having a sequence comprising, or sharing at least 90% sequence identity with, a sequence selected from SEQ ID NOs: 2785 and 2787; an hGRK promoter for the Cas9 and two guide RNAs, each having a sequence comprising, or sharing at least 90% sequence identity with, a sequence selected from SEQ ID NOs: 2785 and 2787; an EFS promoter for the Cas9 and one guide RNA having a sequence comprising, or sharing at least 90% sequence identity with, a sequence selected from SEQ ID NOs: 2785 and 2787; an EFS promoter for the Cas9 and two guide RNAs, each having a sequence comprising, or sharing at least 90% sequence identity with, a sequence selected from SEQ ID NOs: 2785 and 2787.

DNA-Based Delivery of a Cas9 Molecule and/or a gRNA Molecule

[1373] Nucleic acids encoding Cas9 molecules (e.g., eaCas9 molecules) and/or gRNA molecules, can be administered to subjects or delivered into cells by art-known methods or as described herein. For example, Cas9-encoding and/or gRNA-encoding DNA can be delivered, e.g., by vectors (e.g., viral or non-viral vectors), non-vector based methods (e.g., using naked DNA or DNA complexes), or a combination thereof.

[1374] DNA encoding Cas9 molecules (e.g., eaCas9 molecules) and/or gRNA molecules can be conjugated to molecules (e.g., N-acetylgalactosamine) promoting uptake by the target cells (e.g., the target cells described herein). Donor template molecules can be conjugated to molecules (e.g., N-acetylgalactosamine) promoting uptake by the target cells (e.g., the target cells described herein).

[1375] In some embodiments, the Cas9- and/or gRNA-encoding DNA is delivered by a vector (e.g., viral vector/virus or plasmid).

[1376] A vector can comprise a sequence that encodes a Cas9 molecule and/or a gRNA molecule. A vector can also comprise a sequence encoding a signal peptide (e.g., for nuclear localization, nucleolar localization, mitochondrial localization), fused, e.g., to a Cas9 molecule sequence. For example, a vector can comprise a nuclear localization sequence (e.g., from SV40) fused to the sequence encoding the Cas9 molecule.

[1377] One or more regulatory/control elements, e.g., a promoter, an enhancer, an intron, a polyadenylation signal, a Kozak consensus sequence, internal ribosome entry sites (IRES), a 2A sequence, and splice acceptor or donor can be included in the vectors. In some embodiments, the promoter is recognized by RNA polymerase II (e.g., a CMV promoter). In other embodiments, the promoter is recognized by RNA polymerase III (e.g., a U6 promoter). In some embodiments, the promoter is a regulated promoter (e.g., inducible promoter). In other embodiments, the promoter is a constitutive promoter. In some embodiments, the promoter is a tissue specific promoter. In some embodiments, the promoter is a viral promoter. In other embodiments, the promoter is a non-viral promoter.

[1378] In some embodiments, the vector or delivery vehicle is a viral vector (e.g., for generation of recombinant viruses). In some embodiments, the virus is a DNA virus (e.g., dsDNA or ssDNA virus). In other embodiments, the virus is an RNA virus (e.g., an ssRNA virus). Exemplary viral vectors/viruses include, e.g., retroviruses, lentiviruses, adenovirus, adeno-associated virus (AAV), vaccinia viruses, poxviruses, and herpes simplex viruses.

[1379] In some embodiments, the virus infects dividing cells. In other embodiments, the virus infects non-dividing cells. In some embodiments, the virus infects both dividing and non-dividing cells. In some embodiments, the virus can integrate into the host genome. In some embodiments, the virus is engineered to have reduced immunity, e.g., in human. In some embodiments, the virus is replication-competent. In other embodiments, the virus is replication-defective, e.g., having one or more coding regions for the genes necessary for additional rounds of virion replication and/or packaging replaced with other genes or deleted. In some embodiments, the virus causes transient expression of the Cas9 molecule and/or the gRNA molecule. In other embodiments, the virus causes long-lasting, e.g., at least 1 week, 2 weeks, 1 month, 2 months, 3 months, 6 months, 9 months, 1 year, 2 years, or permanent expression, of the Cas9 molecule and/or the gRNA molecule. The packaging capacity of the viruses may vary, e.g., from at least about 4 kb to at least about 30 kb, e.g., at least about 5 kb, 10 kb, 15 kb, 20 kb, 25 kb, 30 kb, 35 kb, 40 kb, 45 kb, or 50 kb.

[1380] In an embodiment, the viral vector recognizes a specific cell type or tissue. For example, the viral vector can be pseudotyped with a different/alternative viral envelope glycoprotein; engineered with a cell type-specific receptor (e.g., genetic modification(s) of one or more viral envelope glycoproteins to incorporate a targeting ligand such as a peptide ligand, a single chain antibody, or a growth factor); and/or engineered to have a molecular bridge with dual specificities with one end recognizing a viral glycoprotein and the other end recognizing a moiety of the target cell surface (e.g., a ligand-receptor, monoclonal antibody, avidin-biotin and chemical conjugation).

[1381] In some embodiments, the Cas9- and/or gRNA-encoding DNA is delivered by a recombinant retrovirus. In some embodiments, the retrovirus (e.g., Moloney murine leukemia virus) comprises a reverse transcriptase, e.g., that allows integration into the host genome. In some embodiments, the retrovirus is replication-competent. In other embodiments, the retrovirus is replication-defective, e.g., having one of more coding regions for the genes necessary for additional rounds of virion replication and packaging replaced with other genes, or deleted. In some embodiments, the Cas9- and/or gRNA-encoding DNA is delivered by a recombinant lentivirus. For example, the lentivirus is replication-defective, e.g., does not comprise one or more genes required for viral replication.

[1382] In some embodiments, the Cas9- and/or gRNA-encoding DNA is delivered by a recombinant adenovirus. In some embodiments, the adenovirus is engineered to have reduced immunity in human.

[1383] In some embodiments, the Cas9- and/or gRNA-encoding DNA is delivered by a recombinant AAV. In some embodiments, the AAV does not incorporate its genome into that of a host cell, e.g., a target cell as describe herein. In some embodiments, the AAV can incorporate at least part of its genome into that of a host cell, e.g., a target cell as described herein. In some embodiments, the AAV is a self-complementary adeno-associated virus (scAAV), e.g., a scAAV that packages both strands which anneal together to form double stranded DNA. AAV serotypes that may be used in the disclosed methods, include AAV1, AAV2, modified AAV2 (e.g., modifications at Y444F, Y500F, Y730F and/or S662V), AAV3, modified AAV3 (e.g., modifications at Y705F, Y731F and/or T492V), AAV4, AAV5, AAV6, modified AAV6 (e.g., modifications at S663V and/or T492V), AAV8, AAV 8.2, AAV9, AAV rh10, and pseudotyped AAV, such as AAV2/8, AAV2/5 and AAV2/6 can also be used in the disclosed methods. In an embodiment, an AAV capsid that can be used in the methods described herein is a capsid sequence from serotype AAV1, AAV2, AAV3, AAV4, AAV5, AAV6, AAV7, AAV8, AAV9, AAV.rh8, AAV.rh10, AAV.rh32/33, AAV.rh43, AAV.rh64R1, or AAV7m8. Exemplary AAV serotypes and ITR sequences are disclosed in Table 25.

[1384] In an embodiment, the Cas9- and/or gRNA-encoding DNA is delivered in a re-engineered AAV capsid, e.g., with 50% or greater, e.g., 60% or greater, 70% or greater, 80% or greater, 90% or greater, or 95% or greater, sequence homology with a capsid sequence from serotypes AAV1, AAV2, AAV3, AAV4, AAV5, AAV6, AAV7, AAV8, AAV9, AAV.rh8, AAV.rh10, AAV.rh32/33, AAV.rh43, or AAV.rh64R1.

[1385] In an embodiment, the Cas9- and/or gRNA-encoding DNA is delivered by a chimeric AAV capsid. Exemplary chimeric AAV capsids include, but are not limited to, AAV9i1, AAV2i8, AAV-DJ, AAV2G9, AAV2i8G9, or AAV8G9.

[1386] In an embodiment, the AAV is a self-complementary adeno-associated virus (scAAV), e.g., a scAAV that packages both strands which anneal together to form double stranded DNA.

[1387] In some embodiments, the Cas9- and/or gRNA-encoding DNA is delivered by a hybrid virus, e.g., a hybrid of one or more of the viruses described herein. In an embodiment, the hybrid virus is hybrid of an AAV (e.g., of any AAV serotype), with a Bocavirus, B19 virus, porcine AAV, goose AAV, feline AAV, canine AAV, or MVM.

[1388] A packaging cell is used to form a virus particle that is capable of infecting a target cell. Such a cell includes a 293 cell, which can package adenovirus, and a ψ2 cell or a PA317 cell, which can package retrovirus. A viral vector used in gene therapy is usually generated by a producer cell line that packages a nucleic acid vector into a viral particle. The vector typically contains the minimal viral sequences required for packaging and subsequent integration into a host or target cell (if applicable), with other viral sequences being replaced by an expression cassette encoding the protein to be expressed, e.g., Cas9. For example, an AAV vector used in gene therapy typically only possesses inverted terminal repeat (ITR) sequences from the AAV genome which are required for packaging and gene expression in the host or target cell. The missing viral functions can be supplied in trans by the packaging cell line and/or plasmid containing E2A, E4, and VA genes from adenovirus, and plasmid encoding Rep and Cap genes from AAV, as described in “Triple Transfection Protocol.” Henceforth, the viral DNA is packaged in a cell line, which contains a helper plasmid encoding the other AAV genes, namely rep and cap, but lacking ITR sequences. In embodiment, the viral DNA is packaged in a producer cell line, which contains E1A and/or E1B genes from adenovirus. The cell line is also infected with adenovirus as a helper. The helper virus (e.g., adenovirus or HSV) or helper plasmid promotes replication of the AAV vector and expression of AAV genes from the plasmid with ITRs. The helper plasmid is not packaged in significant amounts due to a lack of ITR sequences. Contamination with adenovirus can be reduced by, e.g., heat treatment to which adenovirus is more sensitive than AAV.

[1389] In an embodiment, the viral vector has the ability of cell type and/or tissue type recognition. For example, the viral vector can be pseudotyped with a different/alternative viral envelope glycoprotein; engineered with a cell type-specific receptor (e.g., genetic modification of the viral envelope glycoproteins to incorporate targeting ligands such as a peptide ligand, a single chain antibody, a growth factor); and/or engineered to have a molecular bridge with dual specificities with one end recognizing a viral glycoprotein and the other end recognizing a moiety of the target cell surface (e.g., ligand-receptor, monoclonal antibody, avidin-biotin and chemical conjugation).

[1390] In an embodiment, the viral vector achieves cell type specific expression. For example, a tissue-specific promoter can be constructed to restrict expression of the transgene (Cas 9 and gRNA) in only the target cell. The specificity of the vector can also be mediated by microRNA-dependent control of transgene expression. In an embodiment, the viral vector has increased efficiency of fusion of the viral vector and a target cell membrane. For example, a fusion protein such as fusion-competent hemagglutin (HA) can be incorporated to increase viral uptake into cells. In an embodiment, the viral vector has the ability of nuclear localization. For example, a virus that requires the breakdown of the cell wall (during cell division) and therefore will not infect a non-diving cell can be altered to incorporate a nuclear localization peptide in the matrix protein of the virus thereby enabling the transduction of non-proliferating cells. In some embodiments, the Cas9- and/or gRNA-encoding DNA is delivered by a non-vector based method (e.g., using naked DNA or DNA complexes). For example, the DNA can be delivered, e.g., by organically modified silica or silicate (Ormosil), electroporation, gene gun, sonoporation, magnetofection, lipid-mediated transfection, dendrimers, inorganic nanoparticles, calcium phosphates, or a combination thereof.

[1391] In some embodiments, the Cas9- and/or gRNA-encoding DNA is delivered by a combination of a vector and a non-vector based method. For example, a virosome comprises a liposome combined with an inactivated virus (e.g., HIV or influenza virus), which can result in more efficient gene transfer, e.g., in a respiratory epithelial cell than either a viral or a liposomal method alone.

[1392] In an embodiment, the delivery vehicle is a non-viral vector. In an embodiment, the non-viral vector is an inorganic nanoparticle. Exemplary inorganic nanoparticles include, e.g., magnetic nanoparticles (e.g., Fe₃MnO₂) and silica. The outer surface of the nanoparticle can be conjugated with a positively charged polymer (e.g., polyethylenimine, polylysine, polyserine) which allows for attachment (e.g., conjugation or entrapment) of payload. In an embodiment, the non-viral vector is an organic nanoparticle (e.g., entrapment of the payload inside the nanoparticle). Exemplary organic nanoparticles include, e.g., SNALP liposomes that contain cationic lipids together with neutral helper lipids which are coated with polyethylene glycol (PEG) and protamine and nucleic acid complex coated with lipid coating.

[1393] Exemplary lipids for gene transfer are shown below in Table 21.

TABLE 21
Lipids Used for Gene Transfer

| Lipid | Abbreviation | Feature |
|---|---|---|
| 1,2-Dioleoyl-sn-glycero-3-phosphatidylcholine | DOPC | Helper |
| 1,2-Dioleoyl-sn-glycero-3-phosphatidylethanolamine | DOPE | Helper |
| Cholesterol | | Helper |
| N-[1-(2,3-Dioleyloxy)prophyl]N,N,N-trimethylammonium | DOTMA | Cationic |
| chloride | | |
| 1,2-Dioleoyloxy-3-trimethylammonium-propane | DOTAP | Cationic |
| Dioctadecylamidoglycylspermine | DOGS | Cationic |
| N-(3-Aminopropyl)-N,N-dimethyl-2,3-bis(dodecyloxy)-1- | GAP-DLRIE | Cationic |
| propanaminium bromide | | |
| Cetyltrimethyl ammonium bromide | CTAB | Cationic |
| 6-Lauroxyhexyl ornithinate | LHON | Cationic |
| 1-(2,3-Dioleoyloxypropyl)-2,4,6-trimethylpyridinium | 2Oc | Cationic |
| 2,3-Dioleyloxy-N-[2(sperminecarboxamido-ethyl]-N,N-dimethyl- | DOSPA | Cationic |
| 1-propanaminium trifluoroacetate | | |
| 1,2-Dioleyl-3-trimethylammonium-propane | DOPA | Cationic |
| N-(2-Hydroxyethyl)-N,N-dimethyl-2,3-bis(tetradecyloxy)-1- | MDRIE | Cationic |
| propanaminium bromide | | |
| Dimyristooxypropyl dimethyl hydroxyethyl ammonium bromide | DMRI | Cationic |
| 3β-[N-(N',N'-Dimethylaminoethane)-carbamoyl]cholesterol | DC-Chol | Cationic |
| Bis-guanidium-tren-cholesterol | BGTC | Cationic |
| 1,3-Diodeoxy-2-(6-carboxy-spermyl)-propylamide | DOSPER | Cationic |
| Dimethyloctadecylammonium bromide | DDAB | Cationic |
| Dioctadecylamidoglicylspermidin | DSL | Cationic |
| rac-[(2,3-Dioctadecyloxypropyl)(2-hydroxyethyl)]- | CLIP-1 | Cationic |
| dimethylammonium chloride | | |
| rac-[2(2,3-Dihexadecyloxypropyl- | CLIP-6 | Cationic |
| oxymethyloxy)ethyl]trimethylammonium bromide | | |
| Ethyldimyristoylphosphatidylcholine | EDMPC | Cationic |
| 1,2-Distearyloxy-N,N-dimethyl-3-aminopropane | DSDMA | Cationic |
| 1,2-Dimyristoyl-trimethylammonium propane | DMTAP | Cationic |
| O,O′-Dimyristyl-N-lysyl aspartate | DMKE | Cationic |
| 1,2-Distearoyl-sn-glycero-3-ethylphosphocholine | DSEPC | Cationic |
| N-Palmitoyl D-erythro-sphingosyl carbamoyl-spermine | CCS | Cationic |
| N-t-Butyl-N0-tetradecyl-3-tetradecylaminopropionamidine | diC14-amidine | Cationic |
| Octadecenolyoxy[ethyl-2-heptadecenyl-3 hydroxyethyl] | DOTIM | Cationic |
| imidazolinium chloride | | |
| N1-Cholesteryloxycarbonyl-3,7-diazanonane-1,9-diamine | CDAN | Cationic |
| 2-(3-[Bis(3-amino-propyl)-amino]propylamino)-N- | RPR209120 | Cationic |
| ditetradecylcarbamoylme-ethyl-acetamide | | |
| 1,2-dilinoleyloxy-3-dimethylaminopropane | DLinDMA | Cationic |
| 2,2-dilinoleyl-4-dimethylaminoethyl-[1,3]-dioxolane | DLin-KC2- | Cationic |
| | DMA | |
| dilinoleyl-methyl-4-dimethylaminobutyrate | DLin-MC3- | Cationic |
| | DMA | |

Exemplary polymers for gene transfer are shown below in Table 22.

TABLE 22
Polymers Used for Gene Transfer

| Polymer | Abbreviation |
|---|---|
| Poly(ethylene)glycol | PEG |
| Polyethylenimine | PEI |
| Dithiobis(succinimidylpropionate) | DSP |
| Dimethyl-3,3′-dithiobispropionimidate | DTBP |
| Poly(ethylene imine)biscarbamate | PEIC |
| Poly(L-lysine) | PLL |
| Histidine modified PLL | |
| Poly(N-vinylpyrrolidone) | PVP |
| Poly(propylenimine) | PPI |
| Poly(amidoamine) | PAMAM |
| Poly(amidoethylenimine) | SS-PAEI |
| Triethylenetetramine | TETA |
| Poly(β-aminoester) | |
| Poly(4-hydroxy-L-proline ester) | PHP |
| Poly(allylamine) | |
| Poly(α-[4-aminobutyl]-L-glycolic acid) | PAGA |
| Poly(D,L-lactic-co-glycolic acid) | PLGA |
| Poly(N-ethyl-4-vinylpyridinium bromide) | |
| Poly(phosphazene)s | PPZ |
| Poly(phosphoester)s | PPE |
| Poly(phosphoramidate)s | PPA |
| Poly(N-2-hydroxypropylmethacrylamide) | pHPMA |
| Poly(2-(dimethylamino)ethyl methacrylate) | pDMAEMA |
| Poly(2-aminoethyl propylene phosphate) | PPE-EA |
| Chitosan | |
| Galactosylated chitosan | |
| N-Dodacylated chitosan | |
| Histone | |
| Collagen | |
| Dextran-spermine | D-SPM |

[1394] In an embodiment, the vehicle has targeting modifications to increase target cell update of nanoparticles and liposomes, e.g., cell specific antigens, monoclonal antibodies, single chain antibodies, aptamers, polymers, sugars, and cell penetrating peptides. In an embodiment, the vehicle uses fusogenic and endosome-destabilizing peptides/polymers. In an embodiment, the vehicle undergoes acid-triggered conformational changes (e.g., to accelerate endosomal escape of the cargo). In an embodiment, a stimuli-cleavable polymer is used, e.g., for release in a cellular compartment. For example, disulfide-based cationic polymers that are cleaved in the reducing cellular environment can be used.

[1395] In an embodiment, the delivery vehicle is a biological non-viral delivery vehicle. In an embodiment, the vehicle is an attenuated bacterium (e.g., naturally or artificially engineered to be invasive but attenuated to prevent pathogenesis and expressing the transgene (e.g., Listeria monocytogenes, certain Salmonella strains, Bifidobacterium longum, and modified Escherichia coli), bacteria having nutritional and tissue-specific tropism to target specific tissues, bacteria having modified surface proteins to alter target tissue specificity). In an embodiment, the vehicle is a genetically modified bacteriophage (e.g., engineered phages having large packaging capacity, less immunogenic, containing mammalian plasmid maintenance sequences and having incorporated targeting ligands). In an embodiment, the vehicle is a mammalian virus-like particle. For example, modified viral particles can be generated (e.g., by purification of the “empty” particles followed by ex vivo assembly of the virus with the desired cargo). The vehicle can also be engineered to incorporate targeting ligands to alter target tissue specificity. In an embodiment, the vehicle is a biological liposome. For example, the biological liposome is a phospholipid-based particle derived from human cells (e.g., erythrocyte ghosts, which are red blood cells broken down into spherical structures derived from the subject (e.g., tissue targeting can be achieved by attachment of various tissue or cell-specific ligands), or secretory exosomes—subject (i.e., patient) derived membrane-bound nanovesicle (30-100 nm) of endocytic origin (e.g., can be produced from various cell types and can therefore be taken up by cells without the need of for targeting ligands).

[1396] In an embodiment, one or more nucleic acid molecules (e.g., DNA molecules) other than the components of a Cas system, e.g., the Cas9 molecule component and/or the gRNA molecule component described herein, are delivered. In an embodiment, the nucleic acid molecule is delivered at the same time as one or more of the components of the Cas system are delivered. In an embodiment, the nucleic acid molecule is delivered before or after (e.g., less than about 30 minutes, 1 hour, 2 hours, 3 hours, 6 hours, 9 hours, 12 hours, 1 day, 2 days, 3 days, 1 week, 2 weeks, or 4 weeks) one or more of the components of the Cas system are delivered. In an embodiment, the nucleic acid molecule is delivered by a different means than one or more of the components of the Cas system, e.g., the Cas9 molecule component and/or the gRNA molecule component, are delivered. The nucleic acid molecule can be delivered by any of the delivery methods described herein. For example, the nucleic acid molecule can be delivered by a viral vector, e.g., an integration-deficient lentivirus, and the Cas9 molecule component and/or the gRNA molecule component can be delivered by electroporation, e.g., such that the toxicity caused by nucleic acids (e.g., DNAs) can be reduced. In an embodiment, the nucleic acid molecule encodes a therapeutic protein, e.g., a protein described herein. In an embodiment, the nucleic acid molecule encodes an RNA molecule, e.g., an RNA molecule described herein.

### Delivery of RNA Encoding a Cas9 Molecule

[1397] RNA encoding Cas9 molecules (e.g., eaCas9 molecules) and/or gRNA molecules, can be delivered into cells, e.g., target cells described herein, by art-known methods or as described herein. For example, Cas9-encoding and/or gRNA-encoding RNA can be delivered, e.g., by microinjection, electroporation, lipid-mediated transfection, peptide-mediated delivery, or a combination thereof. Cas9-encoding and/or gRNA-encoding RNA can be conjugated to molecules (e.g., GalNAc) promoting uptake by the target cells (e.g., target cells described herein).

### Delivery Cas9 Protein

[1398] Cas9 molecules (e.g., eaCas9 molecules) can be delivered into cells by art-known methods or as described herein. For example, Cas9 protein molecules can be delivered, e.g., by microinjection, electroporation, lipid-mediated transfection, peptide-mediated delivery, or a combination thereof. Delivery can be accompanied by DNA encoding a gRNA or by a gRNA. Cas9-encoding and/or gRNA-encoding RNA can be conjugated to molecules (e.g., GalNAc) promoting uptake by the target cells (e.g., target cells described herein).

### Route of Administration

[1399] Systemic modes of administration include oral and parenteral routes. Parenteral routes include, by way of example, intravenous, intrarterial, intramuscular, intradermal, subcutaneous, intranasal and intraperitoneal routes. Components administered systemically may be modified or formulated to target the components to the eye.

[1400] Local modes of administration include, by way of example, intraocular, intraorbital, subconjuctival, intravitreal, subretinal or transscleral routes. In an embodiment, significantly smaller amounts of the components (compared with systemic approaches) may exert an effect when administered locally (for example, intravitreally) compared to when administered systemically (for example, intravenously). Local modes of administration can reduce or eliminate the incidence of potentially toxic side effects that may occur when therapeutically effective amounts of a component are administered systemically.

[1401] In an embodiment, components described herein are delivered subretinally, e.g., by subretinal injection. Subretinal injections may be made directly into the macular, e.g., submacular injection.

[1402] In an embodiment, components described herein are delivered by intravitreal injection. Intravitreal injection has a relatively low risk of retinal detachment. In an embodiment, nanoparticle or viral, e.g., AAV vector, is delivered intravitreally.

[1403] Methods for administration of agents to the eye are known in the medical arts and can be used to administer components described herein. Exemplary methods include intraocular injection (e.g., retrobulbar, subretinal, submacular, intravitreal and intrachoridal), iontophoresis, eye drops, and intraocular implantation (e.g., intravitreal, sub-Tenons and sub-conjunctival).

[1404] Administration may be provided as a periodic bolus (for example, subretinally, intravenously or intravitreally) or as continuous infusion from an internal reservoir (for example, from an implant disposed at an intra- or extra-ocular location (see, U.S. Pat. Nos. 5,443,505 and 5,766,242)) or from an external reservoir (for example, from an intravenous bag). Components may be administered locally, for example, by continuous release from a sustained release drug delivery device immobilized to an inner wall of the eye or via targeted transscleral controlled release into the choroid (see, e.g., PCT/US00/00207; PCT/US02/14279; Ambati 2000a; Ambati 2000b. A variety of devices suitable for administering components locally to the inside of the eye are known in the art. See, for example, U.S. Pat. Nos. 6,251,090; 6,299,895; 6,416,777; and 6,413,540; and PCT Appl. No. PCT/US00/28187.

[1405] In addition, components may be formulated to permit release over a prolonged period of time. A release system can include a matrix of a biodegradable material or a material which releases the incorporated components by diffusion. The components can be homogeneously or heterogeneously distributed within the release system. A variety of release systems may be useful, however, the choice of the appropriate system will depend upon rate of release required by a particular application. Both non-degradable and degradable release systems can be used. Suitable release systems include polymers and polymeric matrices, non-polymeric matrices, or inorganic and organic excipients and diluents such as, but not limited to, calcium carbonate and sugar (for example, trehalose). Release systems may be natural or synthetic. However, synthetic release systems are preferred because generally they are more reliable, more reproducible and produce more defined release profiles. The release system material can be selected so that components having different molecular weights are released by diffusion through or degradation of the material.

[1406] Representative synthetic, biodegradable polymers include, for example: polyamides such as poly(amino acids) and poly(peptides); polyesters such as poly(lactic acid), poly(glycolic acid), poly(lactic-co-glycolic acid), and poly(caprolactone); poly(anhydrides); polyorthoesters; polycarbonates; and chemical derivatives thereof (substitutions, additions of chemical groups, for example, alkyl, alkylene, hydroxylations, oxidations, and other modifications routinely made by those skilled in the art), copolymers and mixtures thereof. Representative synthetic, non-degradable polymers include, for example: polyethers such as poly(ethylene oxide), poly(ethylene glycol), and poly(tetramethylene oxide); vinyl polymers-polyacrylates and polymethacrylates such as methyl, ethyl, other alkyl, hydroxyethyl methacrylate, acrylic and methacrylic acids, and others such as poly(vinyl alcohol), poly(vinyl pyrolidone), and poly(vinyl acetate); poly(urethanes); cellulose and its derivatives such as alkyl, hydroxyalkyl, ethers, esters, nitrocellulose, and various cellulose acetates; polysiloxanes; and any chemical derivatives thereof (substitutions, additions of chemical groups, for example, alkyl, alkylene, hydroxylations, oxidations, and other modifications routinely made by those skilled in the art), copolymers and mixtures thereof.

[1407] Poly(lactide-co-glycolide) microsphere can also be used for intraocular injection. Typically the microspheres are composed of a polymer of lactic acid and glycolic acid, which are structured to form hollow spheres. The spheres can be approximately 15-30 microns in diameter and can be loaded with components described herein.

### Bi-Modal or Differential Delivery of Components

[1408] Separate delivery of the components of a Cas system, e.g., the Cas9 molecule component and the gRNA molecule component, and more particularly, delivery of the components by differing modes, can enhance performance, e.g., by improving tissue specificity and safety.

[1409] In an embodiment, the Cas9 molecule and the gRNA molecule are delivered by different modes, or as sometimes referred to herein as differential modes. Different or differential modes, as used herein, refer modes of delivery that confer different pharmacodynamic or pharmacokinetic properties on the subject component molecule, e.g., a Cas9 molecule, gRNA molecule, template nucleic acid, or payload. For example, the modes of delivery can result in different tissue distribution, different half-life, or different temporal distribution, e.g., in a selected compartment, tissue, or organ.

[1410] Some modes of delivery, e.g., delivery by a nucleic acid vector that persists in a cell, or in progeny of a cell, e.g., by autonomous replication or insertion into cellular nucleic acid, result in more persistent expression of and presence of a component. Examples include viral, e.g., adeno associated virus or lentivirus, delivery.

[1411] By way of example, the components, e.g., a Cas9 molecule and a gRNA molecule, can be delivered by modes that differ in terms of resulting half-life or persistent of the delivered component the body, or in a particular compartment, tissue or organ. In an embodiment, a gRNA molecule can be delivered by such modes. The Cas9 molecule component can be delivered by a mode which results in less persistence or less exposure to the body or a particular compartment or tissue or organ.

[1412] More generally, in an embodiment, a first mode of delivery is used to deliver a first component and a second mode of delivery is used to deliver a second component. The first mode of delivery confers a first pharmacodynamic or pharmacokinetic property. The first pharmacodynamic property can be, e.g., distribution, persistence, or exposure, of the component, or of a nucleic acid that encodes the component, in the body, a compartment, tissue or organ. The second mode of delivery confers a second pharmacodynamic or pharmacokinetic property. The second pharmacodynamic property can be, e.g., distribution, persistence, or exposure, of the component, or of a nucleic acid that encodes the component, in the body, a compartment, tissue or organ.

[1413] In an embodiment, the first pharmacodynamic or pharmacokinetic property, e.g., distribution, persistence or exposure, is more limited than the second pharmacodynamic or pharmacokinetic property.

[1414] In an embodiment, the first mode of delivery is selected to optimize, e.g., minimize, a pharmacodynamic or pharmacokinetic property, e.g., distribution, persistence or exposure.

[1415] In an embodiment, the second mode of delivery is selected to optimize, e.g., maximize, a pharmacodynamic or pharmacokinetic property, e.g., distribution, persistence or exposure.

[1416] In an embodiment, the first mode of delivery comprises the use of a relatively persistent element, e.g., a nucleic acid, e.g., a plasmid or viral vector, e.g., an AAV or lentivirus. As such vectors are relatively persistent product transcribed from them would be relatively persistent.

[1417] In an embodiment, the second mode of delivery comprises a relatively transient element, e.g., an RNA or protein.

[1418] In an embodiment, the first component comprises gRNA, and the delivery mode is relatively persistent, e.g., the gRNA is transcribed from a plasmid or viral vector, e.g., an AAV or lentivirus. Transcription of these genes would be of little physiological consequence because the genes do not encode for a protein product, and the gRNAs are incapable of acting in isolation. The second component, a Cas9 molecule, is delivered in a transient manner, for example as mRNA or as protein, ensuring that the full Cas9 molecule/gRNA molecule complex is only present and active for a short period of time.

[1419] Furthermore, the components can be delivered in different molecular form or with different delivery vectors that complement one another to enhance safety and tissue specificity.

[1420] Use of differential delivery modes can enhance performance, safety and efficacy. E.g., the likelihood of an eventual off-target modification can be reduced. Delivery of immunogenic components, e.g., Cas9 molecules, by less persistent modes can reduce immunogenicity, as peptides from the bacterially-derived Cas enzyme are displayed on the surface of the cell by MHC molecules. A two-part delivery system can alleviate these drawbacks.

[1421] Differential delivery modes can be used to deliver components to different, but overlapping target regions. The formation active complex is minimized outside the overlap of the target regions. Thus, in an embodiment, a first component, e.g., a gRNA molecule is delivered by a first delivery mode that results in a first spatial, e.g., tissue, distribution. A second component, e.g., a Cas9 molecule is delivered by a second delivery mode that results in a second spatial, e.g., tissue, distribution. In an embodiment the first mode comprises a first element selected from a liposome, nanoparticle, e.g., polymeric nanoparticle, and a nucleic acid, e.g., viral vector. The second mode comprises a second element selected from the group. In an embodiment, the first mode of delivery comprises a first targeting element, e.g., a cell specific receptor or an antibody, and the second mode of delivery does not include that element. In embodiment, the second mode of delivery comprises a second targeting element, e.g., a second cell specific receptor or second antibody.

[1422] When the Cas9 molecule is delivered in a virus delivery vector, a liposome, or polymeric nanoparticle, there is the potential for delivery to and therapeutic activity in multiple tissues, when it may be desirable to only target a single tissue. A two-part delivery system can resolve this challenge and enhance tissue specificity. If the gRNA molecule and the Cas9 molecule are packaged in separated delivery vehicles with distinct but overlapping tissue tropism, the fully functional complex is only be formed in the tissue that is targeted by both vectors.

### Ex Vivo Delivery

[1423] In some embodiments, components described in Table 18 are introduced into cells which are then introduced into the subject. Methods of introducing the components can include, e.g., any of the delivery methods described in Table 19.

### VIII. Modified Nucleosides, Nucleotides, and Nucleic Acids

[1424] Modified nucleosides and modified nucleotides can be present in nucleic acids, e.g., particularly gRNA, but also other forms of RNA, e.g., mRNA, RNAi, or siRNA. As described herein, “nucleoside” is defined as a compound containing a five-carbon sugar molecule (a pentose or ribose) or derivative thereof, and an organic base, purine or pyrimidine, or a derivative thereof. As described herein, “nucleotide” is defined as a nucleoside further comprising a phosphate group.

[1425] Modified nucleosides and nucleotides can include one or more of:

[1426] (i) alteration, e.g., replacement, of one or both of the non-linking phosphate oxygens and/or of one or more of the linking phosphate oxygens in the phosphodiester backbone linkage;

[1427] (ii) alteration, e.g., replacement, of a constituent of the ribose sugar, e.g., of the 2′ hydroxyl on the ribose sugar;

[1428] (iii) wholesale replacement of the phosphate moiety with “dephospho” linkers;

[1429] (iv) modification or replacement of a naturally occurring nucleobase;

[1430] (v) replacement or modification of the ribose-phosphate backbone;

[1431] (vi) modification of the 3′ end or 5′ end of the oligonucleotide, e.g., removal, modification or replacement of a terminal phosphate group or conjugation of a moiety; and

[1432] (vii) modification of the sugar.

[1433] The modifications listed above can be combined to provide modified nucleosides and nucleotides that can have two, three, four, or more modifications. For example, a modified nucleoside or nucleotide can have a modified sugar and a modified nucleobase. In an embodiment, every base of a gRNA is modified, e.g., all bases have a modified phosphate group, e.g., all are phosphorothioate groups. In an embodiment, all, or substantially all, of the phosphate groups of a unimolecular or modular gRNA molecule are replaced with phosphorothioate groups.

[1434] In an embodiment, modified nucleotides, e.g., nucleotides having modifications as described herein, can be incorporated into a nucleic acid, e.g., a “modified nucleic acid.” In some embodiments, the modified nucleic acids comprise one, two, three or more modified nucleotides. In some embodiments, at least 5% (e.g., at least about 5%, at least about 10%, at least about 15%, at least about 20%, at least about 25%, at least about 30%, at least about 35%, at least about 40%, at least about 45%, at least about 50%, at least about 55%, at least about 60%, at least about 65%, at least about 70%, at least about 75%, at least about 80%, at least about 85%, at least about 90%, at least about 95%, or about 100%) of the positions in a modified nucleic acid are a modified nucleotides.

[1435] Unmodified nucleic acids can be prone to degradation by, e.g., cellular nucleases. For example, nucleases can hydrolyze nucleic acid phosphodiester bonds. Accordingly, in one aspect the modified nucleic acids described herein can contain one or more modified nucleosides or nucleotides, e.g., to introduce stability toward nucleases.

[1436] In some embodiments, the modified nucleosides, modified nucleotides, and modified nucleic acids described herein can exhibit a reduced innate immune response when introduced into a population of cells, both in vivo and ex vivo. The term “innate immune response” includes a cellular response to exogenous nucleic acids, including single stranded nucleic acids, generally of viral or bacterial origin, which involves the induction of cytokine expression and release, particularly the interferons, and cell death. In some embodiments, the modified nucleosides, modified nucleotides, and modified nucleic acids described herein can disrupt binding of a major groove interacting partner with the nucleic acid. In some embodiments, the modified nucleosides, modified nucleotides, and modified nucleic acids described herein can exhibit a reduced innate immune response when introduced into a population of cells, both in vivo and ex vivo, and also disrupt binding of a major groove interacting partner with the nucleic acid.

### Definitions of Chemical Groups

[1437] As used herein, “alkyl” is meant to refer to a saturated hydrocarbon group which is straight-chained or branched. Example alkyl groups include methyl (Me), ethyl (Et), propyl (e.g., n-propyl and isopropyl), butyl (e.g., n-butyl, isobutyl, t-butyl), pentyl (e.g., n-pentyl, isopentyl, neopentyl), and the like. An alkyl group can contain from 1 to about 20, from 2 to about 20, from 1 to about 12, from 1 to about 8, from 1 to about 6, from 1 to about 4, or from 1 to about 3 carbon atoms.

[1438] As used herein, “aryl” refers to monocyclic or polycyclic (e.g., having 2, 3 or 4 fused rings) aromatic hydrocarbons such as, for example, phenyl, naphthyl, anthracenyl, phenanthrenyl, indanyl, indenyl, and the like. In some embodiments, aryl groups have from 6 to about 20 carbon atoms.

[1439] As used herein, “alkenyl” refers to an aliphatic group containing at least one double bond.

[1440] As used herein, “alkynyl” refers to a straight or branched hydrocarbon chain containing 2-12 carbon atoms and characterized in having one or more triple bonds. Examples of alkynyl groups include, but are not limited to, ethynyl, propargyl, and 3-hexynyl.

[1441] As used herein, “arylalkyl” or “aralkyl” refers to an alkyl moiety in which an alkyl hydrogen atom is replaced by an aryl group. Aralkyl includes groups in which more than one hydrogen atom has been replaced by an aryl group. Examples of“arylalkyl” or “aralkyl” include benzyl, 2-phenylethyl, 3-phenylpropyl, 9-fluorenyl, benzhydryl, and trityl groups.

[1442] As used herein, “cycloalkyl” refers to a cyclic, bicyclic, tricyclic, or polycyclic non-aromatic hydrocarbon groups having 3 to 12 carbons. Examples of cycloalkyl moieties include, but are not limited to, cyclopropyl, cyclopentyl, and cyclohexyl.

[1443] As used herein, “heterocyclyl” refers to a monovalent radical of a heterocyclic ring system. Representative heterocyclyls include, without limitation, tetrahydrofuranyl, tetrahydrothienyl, pyrrolidinyl, pyrrolidonyl, piperidinyl, pyrrolinyl, piperazinyl, dioxanyl, dioxolanyl, diazepinyl, oxazepinyl, thiazepinyl, and morpholinyl.

[1444] As used herein, “heteroaryl” refers to a monovalent radical of a heteroaromatic ring system. Examples of heteroaryl moieties include, but are not limited to, imidazolyl, oxazolyl, thiazolyl, triazolyl, pyrrolyl, furanyl, indolyl, thiophenyl pyrazolyl, pyridinyl, pyrazinyl, pyridazinyl, pyrimidinyl, indolizinyl, purinyl, naphthyridinyl, quinolyl, and pteridinyl.

### Phosphate Backbone Modifications

### Phosphate Group

[1445] In some embodiments, the phosphate group of a modified nucleotide can be modified by replacing one or more of the oxygens with a different substituent. Further, the modified nucleotide, e.g., modified nucleotide present in a modified nucleic acid, can include the wholesale replacement of an unmodified phosphate moiety with a modified phosphate as described herein. In some embodiments, the modification of the phosphate backbone can include alterations that result in either an uncharged linker or a charged linker with unsymmetrical charge distribution.

[1446] Examples of modified phosphate groups include, phosphorothioate, phosphoroselenates, borano phosphates, borano phosphate esters, hydrogen phosphonates, phosphoroamidates, alkyl or aryl phosphonates and phosphotriesters. In some embodiments, one of the non-bridging phosphate oxygen atoms in the phosphate backbone moiety can be replaced by any of the following groups: sulfur (S), selenium (Se), BR₃ (wherein R can be, e.g., hydrogen, alkyl, or aryl), C (e.g., an alkyl group, an aryl group, and the like), H, NR₂ (wherein R can be, e.g., hydrogen, alkyl, or aryl), or OR (wherein R can be, e.g., alkyl or aryl). The phosphorous atom in an unmodified phosphate group is achiral. However, replacement of one of the non-bridging oxygens with one of the above atoms or groups of atoms can render the phosphorous atom chiral; that is to say that a phosphorous atom in a phosphate group modified in this way is a stereogenic center. The stereogenic phosphorous atom can possess either the “R” configuration (herein Rp) or the “S” configuration (herein Sp).

[1447] Phosphorodithioates have both non-bridging oxygens replaced by sulfur. The phosphorus center in the phosphorodithioates is achiral which precludes the formation of oligoribonucleotide diastereomers. In some embodiments, modifications to one or both non-bridging oxygens can also include the replacement of the non-bridging oxygens with a group independently selected from S, Se, B, C, H, N, and OR (R can be, e.g., alkyl or aryl).

[1448] The phosphate linker can also be modified by replacement of a bridging oxygen, (i.e., the oxygen that links the phosphate to the nucleoside), with nitrogen (bridged phosphoroamidates), sulfur (bridged phosphorothioates) and carbon (bridged methylenephosphonates). The replacement can occur at either linking oxygen or at both of the linking oxygens.

### Replacement of the Phosphate Group

[1449] The phosphate group can be replaced by non-phosphorus containing connectors. In some embodiments, the charge phosphate group can be replaced by a neutral moiety.

[1450] Examples of moieties which can replace the phosphate group can include, without limitation, e.g., methyl phosphonate, hydroxylamino, siloxane, carbonate, carboxymethyl, carbamate, amide, thioether, ethylene oxide linker, sulfonate, sulfonamide, thioformacetal, formacetal, oxime, methyleneimino, methylenemethylimino, methylenehydrazo, methylenedimethylhydrazo and methyleneoxymethylimino.

### Replacement of the Ribophosphate Backbone

[1451] Scaffolds that can mimic nucleic acids can also be constructed wherein the phosphate linker and ribose sugar are replaced by nuclease resistant nucleoside or nucleotide surrogates. In some embodiments, the nucleobases can be tethered by a surrogate backbone. Examples can include, without limitation, the morpholino, cyclobutyl, pyrrolidine and peptide nucleic acid (PNA) nucleoside surrogates.

### Sugar Modifications

[1452] The modified nucleosides and modified nucleotides can include one or more modifications to the sugar group. For example, the 2′ hydroxyl group (OH) can be modified or replaced with a number of different “oxy” or “deoxy” substituents. In some embodiments, modifications to the 2′ hydroxyl group can enhance the stability of the nucleic acid since the hydroxyl can no longer be deprotonated to form a 2′-alkoxide ion. The 2′-alkoxide can catalyze degradation by intramolecular nucleophilic attack on the linker phosphorus atom.

[1453] Examples of “oxy”-2′ hydroxyl group modifications can include alkoxy or aryloxy (OR, wherein “R” can be, e.g., alkyl, cycloalkyl, aryl, aralkyl, heteroaryl or a sugar); polyethyleneglycols (PEG), O(CH₂CH₂O)ₙCH₂CH₂OR wherein R can be, e.g., H or optionally substituted alkyl, and n can be an integer from 0 to 20 (e.g., from 0 to 4, from 0 to 8, from 0 to 10, from 0 to 16, from 1 to 4, from 1 to 8, from 1 to 10, from 1 to 16, from 1 to 20, from 2 to 4, from 2 to 8, from 2 to 10, from 2 to 16, from 2 to 20, from 4 to 8, from 4 to 10, from 4 to 16, and from 4 to 20). In some embodiments, the “oxy”-2′ hydroxyl group modification can include “locked” nucleic acids (LNA) in which the 2′ hydroxyl can be connected, e.g., by a C₁₋₆ alkylene or C1-6 heteroalkylene bridge, to the 4′ carbon of the same ribose sugar, where exemplary bridges can include methylene, propylene, ether, or amino bridges; O-amino (wherein amino can be, e.g., NH₂; alkylamino, dialkylamino, heterocyclyl, arylamino, diarylamino, heteroarylamino, or diheteroarylamino, ethylenediamine, or polyamino) and aminoalkoxy, O(CH₂)ₙ-amino, (wherein amino can be, e.g., NH₂; alkylamino, dialkylamino, heterocyclyl, arylamino, diarylamino, heteroarylamino, or diheteroarylamino, ethylenediamine, or polyamino). In some embodiments, the “oxy”-2′ hydroxyl group modification can include the methoxyethyl group (MOE), (OCH₂CH₂OCH₃, e.g., a PEG derivative).

[1454] “Deoxy” modifications can include hydrogen (i.e. deoxyribose sugars, e.g., at the overhang portions of partially ds RNA); halo (e.g., bromo, chloro, fluoro, or iodo); amino (wherein amino can be, e.g., NH₂; alkylamino, dialkylamino, heterocyclyl, arylamino, diarylamino, heteroarylamino, diheteroarylamino, or amino acid); NH(CH₂CH₂NH)ₙCH₂CH₂-amino (wherein amino can be, e.g., as described herein), —NHC(O)R (wherein R can be, e.g., alkyl, cycloalkyl, aryl, aralkyl, heteroaryl or sugar), cyano; mercapto; alkyl-thio-alkyl; thioalkoxy; and alkyl, cycloalkyl, aryl, alkenyl and alkynyl, which may be optionally substituted with e.g., an amino as described herein.

[1455] The sugar group can also contain one or more carbons that possess the opposite stereochemical configuration than that of the corresponding carbon in ribose. Thus, a modified nucleic acid can include nucleotides containing e.g., arabinose, as the sugar. The nucleotide “monomer” can have an alpha linkage at the 1′ position on the sugar, e.g., alpha-nucleosides. The modified nucleic acids can also include “abasic” sugars, which lack a nucleobase at C-1′. These abasic sugars can also be further modified at one or more of the constituent sugar atoms. The modified nucleic acids can also include one or more sugars that are in the L form, e.g. L-nucleosides.

[1456] Generally, RNA includes the sugar group ribose, which is a 5-membered ring having an oxygen. Exemplary modified nucleosides and modified nucleotides can include, without limitation, replacement of the oxygen in ribose (e.g., with sulfur (S), selenium (Se), or alkylene, such as, e.g., methylene or ethylene); addition of a double bond (e.g., to replace ribose with cyclopentenyl or cyclohexenyl); ring contraction of ribose (e.g., to form a 4-membered ring of cyclobutane or oxetane); ring expansion of ribose (e.g., to form a 6- or 7-membered ring having an additional carbon or heteroatom, such as for example, anhydrohexitol, altritol, mannitol, cyclohexanyl, cyclohexenyl, and morpholino that also has a phosphoramidate backbone). In some embodiments, the modified nucleotides can include multicyclic forms (e.g., tricyclo; and “unlocked” forms, such as glycol nucleic acid (GNA) (e.g., R-GNA or S-GNA, where ribose is replaced by glycol units attached to phosphodiester bonds), threose nucleic acid (TNA, where ribose is replaced with a-L-threofuranosyl-(3′→2′)).

### Modifications on the Nucleobase

[1457] The modified nucleosides and modified nucleotides described herein, which can be incorporated into a modified nucleic acid, can include a modified nucleobase. Examples of nucleobases include, but are not limited to, adenine (A), guanine (G), cytosine (C), and uracil (U). These nucleobases can be modified or wholly replaced to provide modified nucleosides and modified nucleotides that can be incorporated into modified nucleic acids. The nucleobase of the nucleotide can be independently selected from a purine, a pyrimidine, a purine or pyrimidine analog. In some embodiments, the nucleobase can include, for example, naturally-occurring and synthetic derivatives of a base.

### Uracil

[1458] In some embodiments, the modified nucleobase is a modified uracil. Exemplary nucleobases and nucleosides having a modified uracil include without limitation pseudouridine (u), pyridin-4-one ribonucleoside, 5-aza-uridine, 6-aza-uridine, 2-thio-5-aza-uridine, 2-thio-uridine (s2U), 4-thio-uridine (s4U), 4-thio-pseudouridine, 2-thio-pseudouridine, 5-hydroxy-uridine (ho⁵U), 5-aminoallyl-uridine, 5-halo-uridine (e.g., 5-iodo-uridine or 5-bromo-uridine), 3-methyl-uridine (m³U), 5-methoxy-uridine (mo⁵U), uridine 5-oxyacetic acid (cmo⁵U), uridine 5-oxyacetic acid methyl ester (mcmo⁵U), 5-carboxymethyl-uridine (cm⁵U), 1-carboxymethyl-pseudouridine, 5-carboxyhydroxymethyl-uridine (chm⁵U), 5-carboxyhydroxymethyl-uridine methyl ester (mchm⁵U), 5-methoxycarbonylmethyl-uridine (mcm⁵U), 5-methoxycarbonylmethyl-2-thio-uridine (mcm⁵s2U), 5-aminomethyl-2-thio-uridine (nm⁵s2U), 5-methylaminomethyl-uridine (mnm⁵U), 5-methylaminomethyl-2-thio-uridine (mnm⁵s2U), 5-methylaminomethyl-2-seleno-uridine (mnm⁵ se²U), 5-carbamoylmethyl-uridine (ncm⁵U), 5-carboxymethylaminomethyl-uridine (cmnm⁵U), 5-carboxymethyl aminomethyl-2-thio-uridine (cmnm⁵s2U), 5-propynyl-uridine, 1-propynyl-pseudouridine, 5-taurinomethyl-uridine (τcm⁵U), 1-taurinomethyl-pseudouridine, 5-taurinomethyl-2-thio-uridine(τm⁵ s2U), 1-taurinomethyl-4-thio-pseudouridine, 5-methyl-uridine (m⁵U, i.e., having the nucleobase deoxythymine), 1-methyl-pseudouridine (m¹), 5-methyl-2-thio-uridine (m⁵ s2U), 1-methyl-4-thio-pseudouridine (m¹s4ψr), 4-thio-1-methyl-pseudouridine, 3-methyl-pseudouridine (m³ψr), 2-thio-1-methyl-pseudouridine, 1-methyl-1-deaza-pseudouridine, 2-thio-1-methyl-1-deaza-pseudouridine, dihydrouridine (D), dihydropseudouridine, 5,6-dihydrouridine, 5-methyl-dihydrouridine (m⁵D), 2-thio-dihydrouridine, 2-thio-dihydropseudouridine, 2-methoxy-uridine, 2-methoxy-4-thio-uridine, 4-methoxy-pseudouridine, 4-methoxy-2-thio-pseudouridine, N1-methyl-pseudouridine, 3-(3-amino-3-carboxypropyl)uridine (acp³U), 1-methyl-3-(3-amino-3-carboxypropyl)pseudouridine (acp³ψ), 5-(isopentenylaminomethyl)uridine (inm⁵U), 5-(isopentenylaminomethyl)-2-thio-uridine (inm⁵s2U), α-thio-uridine, 2′-O-methyl-uridine (Um), 5,2′-O-dimethyl-uridine (m⁵Um), 2′-O-methyl-pseudouridine (ψm), 2-thio-2′-O-methyl-uridine (s2Um), 5-methoxycarbonylmethyl-2′-O-methyl-uridine (mcm ⁵Um), 5-carbamoylmethyl-2′-O-methyl-uridine (ncm ⁵Um), 5-carboxymethyl aminomethyl-2′-O-methyl-uridine (cmnm ⁵Um), 3,2′-O-dimethyl-uridine (m³Um), 5-(isopentenyl aminomethyl)-2′-O-methyl-uridine (inm ⁵Um), 1-thio-uridine, deoxythymidine, 2′-F-ara-uridine, 2′-F-uridine, 2′-OH-ara-uridine, 5-(2-carbomethoxyvinyl) uridine, 5-[3-(1-E-propenylamino)uridine, pyrazolo[3,4-d]pyrimidines, xanthine, and hypoxanthine.

### Cytosine

[1459] In some embodiments, the modified nucleobase is a modified cytosine. Exemplary nucleobases and nucleosides having a modified cytosine include without limitation 5-aza-cytidine, 6-aza-cytidine, pseudoisocytidine, 3-methyl-cytidine (m³C), N4-acetyl-cytidine (act), 5-formyl-cytidine (f⁵C), N4-methyl-cytidine (m⁴C), 5-methyl-cytidine (m⁵C), 5-halo-cytidine (e.g., 5-iodo-cytidine), 5-hydroxymethyl-cytidine (hm⁵C), 1-methyl-pseudoisocytidine, pyrrolo-cytidine, pyrrolo-pseudoisocytidine, 2-thio-cytidine (s2C), 2-thio-5-methyl-cytidine, 4-thio-pseudoisocytidine, 4-thio-1-methyl-pseudoisocytidine, 4-thio-1-methyl-1-deaza-pseudoisocytidine, 1-methyl-1-deaza-pseudoisocytidine, zebularine, 5-aza-zebularine, 5-methyl-zebularine, 5-aza-2-thio-zebularine, 2-thio-zebularine, 2-methoxy-cytidine, 2-methoxy-5-methyl-cytidine, 4-methoxy-pseudoisocytidine, 4-methoxy-1-methyl-pseudoisocytidine, lysidine (k²C), a-thio-cytidine, 2′-O-methyl-cytidine (Cm), 5,2′-O-dimethyl-cytidine (m⁵Cm), N4-acetyl-2′-O-methyl-cytidine (ac⁴Cm), N4,2′-O-dimethyl-cytidine (m⁴Cm), 5-formyl-2′-O-methyl-cytidine (f ⁵Cm), N4,N4,2′-O-trimethyl-cytidine (m⁴₂Cm), 1-thio-cytidine, 2′-F-ara-cytidine, 2′-F-cytidine, and 2′-OH-ara-cytidine.

### Adenine

[1460] In some embodiments, the modified nucleobase is a modified adenine. Exemplary nucleobases and nucleosides having a modified adenine include without limitation 2-amino-purine, 2,6-diaminopurine, 2-amino-6-halo-purine (e.g., 2-amino-6-chloro-purine), 6-halo-purine (e.g., 6-chloro-purine), 2-amino-6-methyl-purine, 8-azido-adenosine, 7-deaza-adenine, 7-deaza-8-aza-adenine, 7-deaza-2-amino-purine, 7-deaza-8-aza-2-amino-purine, 7-deaza-2,6-diaminopurine, 7-deaza-8-aza-2,6-diaminopurine, 1-methyl-adenosine (m A), 2-methyl-adenine (m²A), N6-methyl-adenosine (m⁶A), 2-methylthio-N6-methyl-adenosine (ms2 m⁶A), N6-isopentenyl-adenosine (i⁶A), 2-methylthio-N6-isopentenyl-adenosine (ms²i6A), N6-(cis-hydroxyisopentenyl)adenosine (io⁶A), 2-methylthio-N6-(cis-hydroxyisopentenyl)adenosine (ms2io⁶A), N6-glycinylcarbamoyl-adenosine (g⁶A), N6-threonylcarbamoyl-adenosine (t⁶A), N6-methyl-N6-threonylcarbamoyl-adenosine (m⁶t⁶A), 2-methylthio-N6-threonylcarbamoyl-adenosine (ms²g⁶A), N6,N6-dimethyl-adenosine (m⁶₂A), N6-hydroxynorvalylcarbamoyl-adenosine (hn⁶A), 2-methylthio-N6-hydroxynorvalylcarbamoyl-adenosine (ms2hn⁶A), N6-acetyl-adenosine (ac⁶A), 7-methyl-adenine, 2-methylthio-adenine, 2-methoxy-adenine, α-thio-adenosine, 2′-O-methyl-adenosine (Am), N⁶,2′-O-dimethyl-adenosine (m⁶Am), N⁶-Methyl-2′-deoxyadenosine, N6,N6,2′-O-trimethyl-adenosine (m⁶2Am), 1,2′-O-dimethyl-adenosine (m Am), 2′-O-ribosyladenosine (phosphate) (Ar(p)), 2-amino-N6-methyl-purine, 1-thio-adenosine, 8-azido-adenosine, 2′-F-ara-adenosine, 2′-F-adenosine, 2′-OH-ara-adenosine, and N6-(19-amino-pentaoxanonadecyl)-adenosine.

### Guanine

[1461] In some embodiments, the modified nucleobase is a modified guanine. Exemplary nucleobases and nucleosides having a modified guanine include without limitation inosine (I), 1-methyl-inosine (m¹I), wyosine (imG), methylwyosine (mimG), 4-demethyl-wyosine (imG-14), isowyosine (imG2), wybutosine (yW), peroxywybutosine (ozyW), hydroxywybutosine (OHyW), undermodified hydroxywybutosine (OHyW*), 7-deaza-guanosine, queuosine (Q), epoxyqueuosine (oQ), galactosyl-queuosine (galQ), mannosyl-queuosine (manQ), 7-cyano-7-deaza-guanosine (preQ₀), 7-aminomethyl-7-deaza-guanosine (preQ₁), archaeosine (G+), 7-deaza-8-aza-guanosine, 6-thio-guanosine, 6-thio-7-deaza-guanosine, 6-thio-7-deaza-8-aza-guanosine, 7-methyl-guanosine (m⁷G), 6-thio-7-methyl-guanosine, 7-methyl-inosine, 6-methoxy-guanosine, 1-methyl-guanosine (m′G), N2-methyl-guanosine (m²G), N2,N2-dimethyl-guanosine (m²₂G), N2,7-dimethyl-guanosine (m²,7G), N2, N2,7-dimethyl-guanosine (m²,2,7G), 8-oxo-guanosine, 7-methyl-8-oxo-guanosine, 1-meth thio-guanosine, N2-methyl-6-thio-guanosine, N2,N2-dimethyl-6-thio-guanosine, α-thio-guanosine, 2′-O-methyl-guanosine (Gm), N2-methyl-2′-O-methyl-guanosine (m²Gm), N2,N2-dimethyl-2′-O-methyl-guanosine (m²₂Gm), 1-methyl-2′-O-methyl-guanosine (m′Gm), N2,7-dimethyl-2′-O-methyl-guanosine (m²,7Gm), 2′-O-methyl-inosine (Im), 1,2′-O-dimethyl-inosine (m′Im), O⁶-phenyl-2′-deoxyinosine, 2′-O-ribosylguanosine (phosphate) (Gr(p)), 1-thio-guanosine, O⁶-methyl-guanosine, O⁶-Methyl-2′-deoxyguanosine, 2′-F-ara-guanosine, and 2′-F-guanosine.

Modified gRNAs

[1462] In some embodiments, the modified nucleic acids can be modified gRNAs. In some embodiments, gRNAs can be modified at the 3′ end. In this embodiment, the gRNAs can be modified at the 3′ terminal U ribose. For example, the two terminal hydroxyl groups of the U ribose can be oxidized to aldehyde groups and a concomitant opening of the ribose ring to afford a modified nucleoside as sown below:

[chemical structure]

wherein “U” can be an unmodified or modified uridine.

[1463] In another embodiment, the 3′ terminal U can be modified with a 2′3′ cyclic phosphate as shown below:

[chemical structure]

wherein “U” can be an unmodified or modified uridine.

[1464] In some embodiments, the gRNA molecules may contain 3′ nucleotides which can be stabilized against degradation, e.g., by incorporating one or more of the modified nucleotides described herein. In this embodiment, e.g., uridines can be replaced with modified uridines, e.g., 5-(2-amino)propyl uridine, and 5-bromo uridine, or with any of the modified uridines described herein; adenosines and guanosines can be replaced with modified adenosines and guanosines, e.g., with modifications at the 8-position, e.g., 8-bromo guanosine, or with any of the modified adenosines or guanosines described herein. In some embodiments, deaza nucleotides, e.g., 7-deaza-adenosine, can be incorporated into the gRNA. In some embodiments, O- and N-alkylated nucleotides, e.g., N6-methyl adenosine, can be incorporated into the gRNA. In some embodiments, sugar-modified ribonucleotides can be incorporated, e.g., wherein the 2′ OH-group is replaced by a group selected from H, —OR, —R (wherein R can be, e.g., alkyl, cycloalkyl, aryl, aralkyl, heteroaryl or sugar), halo, —SH, —SR (wherein R can be, e.g., alkyl, cycloalkyl, aryl, aralkyl, heteroaryl or sugar), amino (wherein amino can be, e.g., NH₂; alkylamino, dialkylamino, heterocyclyl, arylamino, diarylamino, heteroarylamino, diheteroarylamino, or amino acid); or cyano (—CN). In some embodiments, the phosphate backbone can be modified as described herein, e.g., with a phosphothioate group. In some embodiments, the nucleotides in the overhang region of the gRNA can each independently be a modified or unmodified nucleotide including, but not limited to 2′-sugar modified, such as, 2-F 2′-O-methyl, thymidine (T), 2′-O-methoxyethyl-5-methyluridine (Teo), 2′-O-methoxyethyladenosine (Aeo), 2′-O-methoxyethyl-5-methylcytidine (m5Ceo), and any combinations thereof.

[1465] In an embodiment, one or more or all of the nucleotides in single stranded RNA molecule, e.g., a gRNA molecule, are deoxynucleotides.

miRNA Binding Sites

[1466] microRNAs (or miRNAs) are naturally occurring cellular 19-25 nucleotide long noncoding RNAs. They bind to nucleic acid molecules having an appropriate miRNA binding site, e.g., in the 3′ UTR of an mRNA, and down-regulate gene expression. While not wishing to be bound by theory, in an embodiment, it is believed that the down regulation is either by reducing nucleic acid molecule stability or by inhibiting translation. An RNA species disclosed herein, e.g., an mRNA encoding Cas9 can comprise an miRNA binding site, e.g., in its 3′UTR. The miRNA binding site can be selected to promote down regulation of expression is a selected cell type. By way of example, the incorporation of a binding site for miR-122, a microRNA abundant in liver, can inhibit the expression of the gene of interest in the liver.

Governing gRNA Molecules and the Use Thereof to Limit the Activity of a Cas9 System

[1467] Methods and compositions that use, or include, a nucleic acid, e.g., DNA, that encodes a Cas9 molecule or a gRNA molecule, can, in addition, use or include a “governing gRNA molecule.” The governing gRNA can limit the activity of the other CRISPR/Cas components introduced into a cell or subject. In an embodiment, a gRNA molecule comprises a targeting domain that is complementary to a target domain on a nucleic acid that comprises a sequence that encodes a component of the CRISPR/Cas system that is introduced into a cell or subject. In an embodiment, a governing gRNA molecule comprises a targeting domain that is complementary with a target sequence on: (a) a nucleic acid that encodes a Cas9 molecule; (b) a nucleic acid that encodes a gRNA which comprises a targeting domain that targets the CEP290 gene (a target gene gRNA); or on more than one nucleic acid that encodes a CRISPR/Cas component, e.g., both (a) and (b). The governing gRNA molecule can complex with the Cas9 molecule to inactivate a component of the system. In an embodiment, a Cas9 molecule/governing gRNA molecule complex inactivates a nucleic acid that comprises the sequence encoding the Cas9 molecule. In an embodiment, a Cas9 molecule/governing gRNA molecule complex inactivates the nucleic acid that comprises the sequence encoding a target gene gRNA molecule. In an embodiment, a Cas9 molecule/governing gRNA molecule complex places temporal, level of expression, or other limits, on activity of the Cas9 molecule/target gene gRNA molecule complex. In an embodiment, a Cas9 molecule/governing gRNA molecule complex reduces off-target or other unwanted activity. In an embodiment, a governing gRNA molecule targets the coding sequence, or a control region, e.g., a promoter, for the CRISPR/Cas system component to be negatively regulated. For example, a governing gRNA can target the coding sequence for a Cas9 molecule, or a control region, e.g., a promoter, that regulates the expression of the Cas9 molecule coding sequence, or a sequence disposed between the two. In an embodiment, a governing gRNA molecule targets the coding sequence, or a control region, e.g., a promoter, for a target gene gRNA. In an embodiment, a governing gRNA, e.g., a Cas9-targeting or target gene gRNA-targeting, governing gRNA molecule, or a nucleic acid that encodes it, is introduced separately, e.g., later, than is the Cas9 molecule or a nucleic acid that encodes it. For example, a first vector, e.g., a viral vector, e.g., an AAV vector, can introduce nucleic acid encoding a Cas9 molecule and one or more target gene gRNA molecules, and a second vector, e.g., a viral vector, e.g., an AAV vector, can introduce nucleic acid encoding a governing gRNA molecule, e.g., a Cas9-targeting or target gene gRNA targeting, gRNA molecule. In an embodiment, the second vector can be introduced after the first. In other embodiments, a governing gRNA molecule, e.g., a Cas9-targeting or target gene gRNA targeting, governing gRNA molecule, or a nucleic acid that encodes it, can be introduced together, e.g., at the same time or in the same vector, with the Cas9 molecule or a nucleic acid that encodes it, but, e.g., under transcriptional control elements, e.g., a promoter or an enhancer, that are activated at a later time, e.g., such that after a period of time the transcription of Cas9 is reduced. In an embodiment, the transcriptional control element is activated intrinsically. In an embodiment, the transcriptional element is activated via the introduction of an external trigger.

[1468] Typically a nucleic acid sequence encoding a governing gRNA molecule, e.g., a Cas9-targeting gRNA molecule, is under the control of a different control region, e.g., promoter, than is the component it negatively modulates, e.g., a nucleic acid encoding a Cas9 molecule. In an embodiment, “different control region” refers to simply not being under the control of one control region, e.g., promoter, that is functionally coupled to both controlled sequences. In an embodiment, different refers to “different control region” in kind or type of control region. For example, the sequence encoding a governing gRNA molecule, e.g., a Cas9-targeting gRNA molecule, is under the control of a control region, e.g., a promoter, that has a lower level of expression, or is expressed later than the sequence which encodes is the component it negatively modulates, e.g., a nucleic acid encoding a Cas9 molecule.

[1469] By way of example, a sequence that encodes a governing gRNA molecule, e.g., a Cas9-targeting governing gRNA molecule, can be under the control of a control region (e.g., a promoter) described herein, e.g., human U6 small nuclear promoter, or human H1 promoter. In an embodiment, a sequence that encodes the component it negatively regulates, e.g., a nucleic acid encoding a Cas9 molecule, can be under the control of a control region (e.g., a promoter) described herein, e.g., CMV, EF-1a, MSCV, PGK, CAG control promoters.

### EXAMPLES

[1470] The following Examples are merely illustrative and are not intended to limit the scope or content of the invention in any way.

### Example 1: Cloning and Initial Screening of gRNAs

[1471] The suitability of candidate gRNAs can be evaluated as described in this example. Although described for a chimeric gRNA, the approach can also be used to evaluate modular gRNAs.

Cloning gRNAs into Plasmid Vector

[1472] For each gRNA, a pair of overlapping oligonucleotides is designed and obtained. Oligonucleotides are annealed and ligated into a digested vector backbone containing an upstream U6 promoter and the remaining sequence of a long chimeric gRNA. Plasmid is sequence-verified and prepped to generate sufficient amounts of transfection-quality DNA. Alternate promoters maybe used to drive in vivo transcription (e.g., H1 promoter) or for in vitro transcription (e.g., T7 promoter).

Cloning gRNAs in Linear dsDNA Molecule (STITCHR)

[1473] For each gRNA, a single oligonucleotide is designed and obtained. The U6 promoter and the gRNA scaffold (e.g. including everything except the targeting domain, e.g., including sequences derived from the crRNA and tracrRNA, e.g., including a first complementarity domain; a linking domain; a second complementarity domain; a proximal domain; and a tail domain) are separately PCR amplified and purified as dsDNA molecules. The gRNA-specific oligonucleotide is used in a PCR reaction to stitch together the U6 and the gRNA scaffold, linked by the targeting domain specified in the oligonucleotide. Resulting dsDNA molecule (STITCHR product) is purified for transfection. Alternate promoters may be used to drive in vivo transcription (e.g., H1 promoter) or for in vitro transcription (e.g., T7 promoter). Any gRNA scaffold may be used to create gRNAs compatible with Cas9s from any bacterial species.

Initial gRNA Screen

[1474] Each gRNA to be tested is transfected, along with a plasmid expressing Cas9 and a small amount of a GFP-expressing plasmid into human cells. In preliminary experiments, these cells can be immortalized human cell lines such as 293T, K562 or U2OS. Alternatively, primary human cells may be used. In this case, cells may be relevant to the eventual therapeutic cell target (for example, photoreceptor cells). The use of primary cells similar to the potential therapeutic target cell population may provide important information on gene targeting rates in the context of endogenous chromatin and gene expression.

[1475] Transfection may be performed using lipid transfection (such as Lipofectamine or Fugene) or by electroporation. Following transfection, GFP expression can be determined either by fluorescence microscopy or by flow cytometry to confirm consistent and high levels of transfection. These preliminary transfections can comprise different gRNAs and different targeting approaches (17-mers, 20-mers, nuclease, dual-nickase, etc.) to determine which gRNAs/combinations of gRNAs give the greatest activity.

[1476] Efficiency of cleavage with each gRNA may be assessed by measuring NHEJ-induced indel formation at the target locus by a T7E1-type assay or by sequencing. Alternatively, other mismatch-sensitive enzymes, such as Cell/Surveyor nuclease, may also be used.

[1477] For the T7E1 assay, PCR amplicons are approximately 500-700 bp with the intended cut site placed asymmetrically in the amplicon. Following amplification, purification and size-verification of PCR products, DNA is denatured and re-hybridized by heating to 95° C. and then slowly cooling. Hybridized PCR products are then digested with T7 Endonuclease I (or other mismatch-sensitive enzyme) which recognizes and cleaves non-perfectly matched DNA. If indels are present in the original template DNA, when the amplicons are denatured and re-annealed, this results in the hybridization of DNA strands harboring different indels and therefore lead to double-stranded DNA that is not perfectly matched. Digestion products may be visualized by gel electrophoresis or by capillary electrophoresis. The fraction of DNA that is cleaved (density of cleavage products divided by the density of cleaved and uncleaved) may be used to estimate a percent NHEJ using the following equation: % NHEJ=(1−(1−fraction cleaved)^{1/2}). The T7E1 assay is sensitive down to about 2-5% NHEJ.

[1478] Sequencing may be used instead of, or in addition to, the T7E1 assay. For Sanger sequencing, purified PCR amplicons are cloned into a plasmid backbone, transformed, miniprepped and sequenced with a single primer. For large sequencing numbers, Sanger sequencing may be used for determining the exact nature of indels after determining the NHEJ rate by T7E1.

[1479] Sequencing may also be performed using next generation sequencing techniques. When using next generation sequencing, amplicons may be 300-500 bp with the intended cut site placed asymmetrically. Following PCR, next generation sequencing adapters and barcodes (for example Illumina multiplex adapters and indexes) may be added to the ends of the amplicon, e.g., for use in high throughput sequencing (for example on an Illumina MiSeq). This method allows for detection of very low NHEJ rates.

### Example 2: Assessment of Gene Targeting by NHEJ

[1480] The gRNAs that induce the greatest levels of NHEJ in initial tests can be selected for further evaluation of gene targeting efficiency. For example, cells may be derived from disease subjects, relevant cell lines, and/or animal models and, therefore, harbor the relevant mutation.

[1481] Following transfection (usually 2-3 days post-transfection,) genomic DNA may be isolated from a bulk population of transfected cells and PCR may be used to amplify the target region. Following PCR, gene targeting efficiency to generate the desired mutations (either knockout of a target gene or removal of a target sequence motif) may be determined by sequencing. For Sanger sequencing, PCR amplicons may be 500-700 bp long. For next generation sequencing, PCR amplicons may be 300-500 bp long. If the goal is to knockout gene function, sequencing may be used to assess what percent of alleles have undergone NHEJ-induced indels that result in a frameshift or large deletion or insertion that would be expected to destroy gene function. If the goal is to remove a specific sequence motif, sequencing may be used to assess what percent of alleles have undergone NHEJ-induced deletions that span this sequence.

### Example 3: Assessment of Activity of Individual gRNAs Targeting CEP290

[1482] Guide RNA were identified using a custom guide RNA design software based on the public tool cas-offinder (Bae 2014). Each gRNA to be tested was generated as a STITCHR product and co-transfected with a plasmid expressing either S. aureus Cas9 (pAF003) or S. pyogenes Cas9 (pJDS246) into either HEK293 cells or primary fibroblasts derived from and LCA10 patient harboring homozygous IVS26 c.2991+1655A to G mutations (hereafter referred to as IVS26 fibroblasts). The pAF003 plasmid encodes the S. aureus Cas9, with N-terminal and C-terminal nuclear localization signals (NLS) and a C-terminal triple flag tag, driven by a CMV promoter. The pJDS246 plasmid encodes the S. pyogenes Cas9, with a C-terminal nuclear localization signal (NLS) and a C-terminal triple flag tag, driven by a CMV promoter. gRNA and Cas9-encoding DNA was introduced into cells by either Mirus TranslT-293 transfection reagent (for 293 cells) or by Amaxa nucleofection (for IVS26 fibroblasts). Nucleofection was optimized for transfection of IVS26 fibroblasts using solution P2 and various pulse codes and assaying for highest levels of gene editing and cell viability. Transfection efficiency in both cell types was assessed by transfecting with GFP and assaying expression by fluorescent microscopy. Three to seven days post-transfection, genomic DNA was isolated from bulk populations of transfected cells and the region of the CEP290 locus surrounding the target site was PCR amplified. PCR amplicons were then cloned into a plasmid backbone using the Zero-Blunt TOPO cloning kit (Life Technologies) and transformed into chemically competent Top10 cells. Bacterial colonies were then cultured and plasmid DNA was isolated and sequenced. Sequencing of PCR products allowed for the detection and quantification of targeted insertion and deletion (indel) events at the target site. FIGS. 11A and 11B show the rates of indels induced by various gRNAs at the CEP290 locus. FIG. 11A shows gene editing (% indels) as assessed by sequencing for S. pyogenes and S. aureus gRNAs when co-expressed with Cas9 in patient-derived IVS26 primary fibroblasts. FIG. 11B shows gene editing (% indels) as assessed by sequencing for S. aureus gRNAs when co-expressed with Cas9 in HEK293 cells.

### Example 4: Detection of gRNA Pair-Induced Deletions by PCR

[1483] To assess the ability of a pair of gRNAs to induce a genomic deletion (in which the sequence between the two cut sites is removed), PCR was performed across the predicted deletion. Pairs of gRNAs (encoded as STITCHR products) were co-transfected with pAF003 into IVS26 fibroblasts. Genomic DNA was isolated from transfected cells and PCR was performed to amplify a segment of the CEP290 locus spanning the two predicted cut sites. PCR was run on a QIAxcel capillary electrophoresis machine. The predicted amplicon on a wildtype allele is 1816 bps. Assuming that cleavage occurs within the gRNA target region, amplicon sizes for alleles having undergone the deletion event were calculated and the presence of this smaller band indicates that the desired genomic deletion event has occurred (Table 23).

TABLE 23

| | | | | | Deletion |
|---|---|---|---|---|---|
| | | | Deletion | Amplicon with | amplicon |
| | Left gRNA | Right gRNA | Size | deletion | detected? |
| 1 | CEP290-367 | CEP290-16 | 590 | 1226 | no |
| 2 | CEP290-367 | CEP290-203 | 688 | 1128 | no |
| 3 | CEP290-367 | CEP290-132 | 815 | 1001 | no |
| 4 | CEP290-367 | CEP290-139 | 1265 | 551 | no |
| 5 | CEP290-312 | CEP290-11 | 790 | 1026 | yes |
| 6 | CEP290-312 | CEP290-252 | 973 | 843 | no |
| 7 | CEP290-312 | CEP290-64 | 976 | 840 | yes |
| 8 | CEP290-312 | CEP290-230 | 1409 | 407 | yes |
| 9 | CEP290-12 | CEP290-11 | 19 | 1797 | no |
| 10 | CEP290-12 | CEP290-252 | 202 | 1614 | no |
| 11 | CEP290-12 | CEP290-64 | 205 | 1611 | no |
| 12 | CEP290-12 | CEP290-230 | 638 | 1178 | no |
| 13 | CEP290-17 | CEP290-16 | 19 | 1797 | no |
| 14 | CEP290-17 | CEP290-203 | 117 | 1699 | no |
| 15 | CEP290-17 | CEP290-132 | 244 | 1572 | no |
| 16 | CEP290-17 | CEP290-139 | 693 | 1123 | no |
| 17 | CEP290-374 | CEP290-16 | 799 | 1017 | no |
| 18 | CEP290-374 | CEP290-203 | 897 | 919 | no |
| 19 | CEP290-374 | CEP290-132 | 1024 | 792 | no |
| 20 | CEP290-374 | CEP290-139 | 1473 | 343 | no |
| 21 | CEP290-368 | CEP290-16 | 854 | 962 | no |
| 22 | CEP290-368 | CEP290-203 | 952 | 864 | no |
| 23 | CEP290-368 | CEP290-132 | 1079 | 737 | no |
| 24 | CEP290-368 | CEP290-139 | 1528 | 288 | no |
| 25 | CEP290-323 | CEP290-11 | 990 | 826 | yes |
| 26 | CEP290-323 | CEP290-252 | 1173 | 643 | no |
| 27 | CEP290-323 | CEP290-64 | 1176 | 640 | yes |
| 28 | CEP290-323 | CEP290-230 | 1609 | 207 | yes |

| | | | |
|---|---|---|---|
| 29 | Cas9 only | wt amplicon = 1816 | no |
| 30 | GFP only | wt amplicon = 1816 | no |
| 31 | no DNA PCR neg ctrl | | |

### Example 5: Gene Expression Analysis of CEP290

[1484] Targeted deletion of a region containing the IVS26 splice mutation is predicted to correct the splicing defect and restore expression of the normal wild-type CEP290 allele. To quantify expression of the wild-type and mutant (containing additional cryptic splice mutation) alleles, TaqMan assays were designed. Multiple assays were tested for each RNA species and a single wt and single mutant assay were selected. The assay for the wild-type allele contains a forward primer that anneals in exon 26, a reverse primer that anneals in exon 27 and a TaqMan probe that spans the exon26-exon-27 junction. The assay for the mutant allele contains a forward primer that anneals in exon 26, a reverse primer that anneals in the cryptic exon and a TaqMan probe that spans the exon26-cryptic exon junction. A TaqMan assay designed to beta-actin was used as a control. Total RNA was isolated from IVS26 cells transfected with pairs of gRNAs and Cas9-expressing plasmid by either Trizol RNA purification (Ambion), Agencourt RNAdvance (Beckman Coulter) or direct cells-to-Ct lysis (Life Technologies). Reverse transcription to generate cDNA was performed and cDNA was used as a template for qRT-PCR using selected taqman assays on a BioRad real time PCR machine. Relative gene expression was calculated by ΔΔCt, relative to beta-actin control and GFP-only sample. Increases in expression of wt allele and decreases in expression of mutant allele relative to GFP-only control indicate corrected splicing due to gene targeting. FIGS. 12A-12B show initial qRT-PCR data for pairs of gRNAs that had shown activity as either individual gRNAs (measured as described in Example 3) or as pairs (measured as described in Example 4). Pairs of gRNAs that showed the desired gene expression changes were repeated in replicate experiments and the cumulative qRT-PCR data is shown in FIG. 13 (error bars represent standard error of the mean calculated from 2 to 6 biological replicates per sample).

### Example 6: Quantification of Genomic Deletions by ddPCR

[1485] Droplet digital PCR (ddPCR) is a method for performing digital PCR in which a single PCR reaction is fractionated into 20,000 droplets in a water-oil emulsion and PCR amplification occurs separately in individual droplets. PCR conditions are optimized for a concentration of DNA template such that each droplet contains either one or no template molecules. Assays were designed to perform amplification using BioRad EvaGreen Supermix PCR system with all amplicons ranging in size from 250-350 bp. Control assays were designed to amplify segments of the CEP290 gene at least 5 kb away from the IVS26 c.2991+1655A to G mutation. Assays to detect targeted genomic deletion were designed such that amplification of an allele that has undergone deletion will yield a PCR product in the size range of 250-350 bp and amplification will not occur on a wild-type allele due to the increased distance between forward and reverse primers. PCR conditions were optimized on genomic DNA isolated from 293 cells that had been transfected with pairs of gRNAs and Cas9-expressing plasmid. Deletion assays were verified to generate no positive signal on genomic DNA isolated from unmodified IVS26 fibroblasts. Assays were further tested and optimized on genomic DNA isolated from IVS26 fibroblasts that had been transfected with pairs of gRNAs and Cas9-encoding plasmid. Of the three assays tested for each of two deletions (CEP290-323 and CEP290-11; and CEP290-323 and CEP290-64) and the 4 control assays tested, a single assay was selected for each deletion and a control based on quality data and replicability in the ddPCR assay. FIG. 14 shows deletion rates on three biological replicates calculated by taking the number of positive droplets for the deletion assay and dividing by the number of positive droplets for the control assay.

### Example 7: Cloning AAV Expression Vectors

[1486] Cloning saCas9 into an AAV Expression Vector

[1487] The pAF003 plasmid encodes the CMV-driven S. aureus Cas9 (saCas9), with N-terminal and C-terminal nuclear localization signals (NLS) and a C-terminal triple flag tag, followed by a bovine growth hormone poly(A) tail (bGH polyA). BGH polyA tail was substituted with a 60-bp minimal polyA tail to obtain pAF003-minimal-pA. The CMV-driven NLS-saCas9-NLS-3×Flag with the minimal polyA tail was amplified with PCR and subcloned into pTR-UF 11 plasmid (ATCC #MBA-331) with KpnI and SphI sites to obtain the pSS3 (pTR-CMV-saCas9-minimal-pA) vector. The CMV promoter sequence can be substituted with EFS promoter (pSS10 vector), or tissue-specific promoters (Table 20, e.g. photo-receptor-specific promoters, e.g. Human GRK1, CRX, NRL, RCVRN promoters, etc.) using SpeI and NotI sites.

Constructing the all-in-One AAV Expression Vector with One gRNA Sequence

[1488] For each individual gRNA sequence, a STITCHR product with a U6 promoter, gRNA, and the gRNA scaffold was obtained by PCR with an oligonucleotide encoding the gRNA sequence. The STITCHR product with one dsDNA molecule of U6-driven gRNA and scaffold was subcloned into pSS3 or pSS10 vectors using KpnI sites flanking the STITCHR product and downstream of the left Inverted Terminal Repeat (ITR) in the AAV vectors. The orientation of the U6-gRNA-scaffold insertion into pSS3 or pSS10 was determined by Sanger sequencing. Alternate promoters may be used to drive gRNA expression (e.g. H1 promoter, 7SK promoter). Any gRNA scaffold sequences compatible with Cas variants from other bacterial species could be incorporated into STITCHR products and the AAV expression vector therein.

Cloning Two gRNA into an AAV Expression Vector

[1489] For each pair of gRNA sequences, two ssDNA oligonucleotides were designed and obtained as the STITCHR primers, i.e. the left STITCHR primer and the right STITCHR primer. Two STITCHR PCR reactions (i.e. the left STITCHR PCR and the right STITCHR PCR) amplified the U6 promoter and the gRNA scaffold with the corresponding STITCHR primer separately. The pSS3 or pSS10 backbone was linearized with KpnI restriction digest. Two dsDNA STITCHR products were purified and subcloned into pSS3 or pSS10 backbone with Gibson Assembly. Due to the unique overlapping sequences upstream and downstream of the STITCHR products, the assembly is unidirectional. The sequences of the constructs were confirmed by Sanger Sequencing. Table 24 lists the names and compositions of AAV expression vectors constructed, including the names of gRNAs targeting human CEP290, the promoter to drive Cas9 expression, and the length of the AAV vector including the Inverted Terminal Repeats (ITRs) from wild type AAV2 genome. Alternative promoters (e.g., H1 promoter or 7SK promoter) or gRNA scaffold sequences compatible with any Cas variants could be adapted into this cloning strategy to obtain the corresponding All-in-One AAV expression vectors with two gRNA sequences.

TABLE 24
Components of AAV expression vectors

| | | | Promoter | Length |
|---|---|---|---|---|
| Name | Left gRNA | Right gRNA | of saCas9 | including ITRs |
| pSS10 | NA | NA | EFS | 4100 |
| pSS11 | CEP290-64 | CEP290-323 | EFS | 4853 |
| pSS15 | CEP290-64 | NA | EFS | 4491 |
| pSS17 | CEP290-323 | NA | EFS | 4491 |
| pSS30 | CEP290-323 | CEP290-64 | EFS | 4862 |
| pSS31 | CEP290-323 | CEP290-11 | EFS | 4862 |
| pSS32 | CEP290-490 | CEP290-502 | EFS | 4858 |
| pSS33 | CEP290-490 | CEP290-496 | EFS | 4858 |
| pSS34 | CEP290-490 | CEP290-504 | EFS | 4857 |
| pSS35 | CEP290-492 | CEP290-502 | EFS | 4858 |
| pSS36 | CEP290-492 | CEP290-504 | EFS | 4857 |
| pSS3 | NA | NA | CMV | 4454 |
| pSS8 | CEP290-64 | CEP290-323 | CMV | 5207 |
| pSS47 | CEP290-323 | CEP290-64 | CMV | 5216 |
| pSS48 | CEP290-323 | CEP290-11 | CMV | 5216 |
| pSS49 | CEP290-490 | CEP290-502 | CMV | 5212 |
| pSS50 | CEP290-490 | CEP290-496 | CMV | 5212 |
| pSS51 | CEP290-490 | CEP290-504 | CMV | 5211 |
| pSS52 | CEP290-492 | CEP290-502 | CMV | 5212 |
| pSS53 | CEP290-492 | CEP290-504 | CMV | 5211 |
| pSS23 | NA | NA | hGRK1 | 4140 |
| pSS24 | NA | NA | hCRX | 3961 |
| pSS25 | NA | NA | hNRL | 4129 |
| pSS26 | NA | NA | hRCVRN | 4083 |

### Example 8: Assessment of the Functions of all-in-One AAV Expression Vectors

[1490] Each individual AAV expression vectors were transfected into 293T cells with TransIT-293 (Mirus, Inc.) to test their function before being packaged into AAV viral vectors. 293T cells were transfected with the same amount of plasmid and harvested at the same time points. SaCas9 protein expression was assessed by western blotting with primary antibody probing for the triple Flag tag at the C-terminus of saCas9, while loading control was demonstrated by αTubulin expression. Deletion events at IVS26 mutation could be determined by PCR amplification followed by Sanger sequencing or ddPCR. The results are shown in FIG. 15.

### Example 9: Production, Purification and Titering of Recombinant AAV2 Vectors

[1491] Prior to packaging into AAV viral vectors, all AAV expression vector (plasmids) underwent primer walk with Sanger sequencing and function analysis. In recombinant AAV (rAAV), two ITRs flanking the transgene cassettes are the only cis-acting elements from the wild-type AAV. They are critical for packaging intact rAAVs and genome-release for rAAV vectors during transduction. All AAV expression vectors were restriction digested with SmaI or XmaI to ensure the presence of two intact ITRs.

[1492] rAAV2 vectors were produced with “Triple Transfection Protocol”: (1) pSS vectors with ITRs and transgene cassettes; (2) pHelper plasmid with E2A, E4, VA genes from Adenovirus; (3) pAAV-RC2 plasmid with Rep and Cap genes from AAV2. These three plasmids were mixed at a mass ratio of 3:6:5 and transfected into HEK293 with polymer or lipid-based transfection reagent (e.g. PEI, PEI max, Lipofectamine, TranslT-293, etc.). 60-72 hours post-transfection, HEK293 cells were harvested and sonicated to release viral vectors. Cell lysates underwent CsCl ultracentrifuge to purify and concentrate the viral vectors. Additional purification procedures were performed to obtain higher purity for biophysical assays, including another round of CsCl ultracentrifuge, or sucrose gradient ultracentrifuge, or affinity chromatography. Viral vectors were dialyzed with 1×DPBS twice before being aliquoted for storage in −80° C. Viral preps can be tittered with Dot-Blot protocol or/and quantitative PCR with probes annealing to sequences on the transgenes. PCR primer sequences are: AACATGCTACGCAGAGAGGGAGTGG (SEQ ID NO: 399) (ITR-Titer-fwd) and CATGAGACAAGGAACCCCTAGTGATGGAG (SEQ ID NO: 400) (ITR-Titer-rev). Reference AAV preps were obtained from the Vector Core at University of North Carolina-Chapel Hill as standards. To confirm the presence of three non-structural viral proteins composing the AAV capsid, viral preps were denatured and probed with anti-AAV VP1/VP2/VP3 monoclonal antibody B1 (American Research Products, Inc. Cat #03-65158) on western blots. The results are shown in FIG. 16.

### Example 10: rAAV-Mediated CEP290 Modification In Vitro

[1493] 293T were transduced with rAAV2 vectors expressing saCas9 with or without gRNA sequences to demonstrate the deletion events near the IVS26 splicing mutant. 293T cells were transduced with rAAV2 viral vectors at an MOI of 1,000 viral genome (vg)/cell or 10,000 vg/cell and harvested at three to seven days post transduction. Western blotting with the primary antibody for Flag (anti-Flag, M2, Sigma-Aldrich) showed that the presence of U6-gRNA-scaffold does not interfere with saCas9 expression. Genomic DNA from 293T was isolated with the Agencourt DNAdvance Kit (Beckman Coulter). Regions including the deletions were PCR amplified from genomic DNA isolated, and analyzed on the QIAxcel capillary electrophoresis machine. Amplicons smaller than the full-length predicted PCR products represent the deletion events in 293T cells. The PCR results are shown in FIG. 17. To further understand the nature of these deletion events, PCR products were cloned into Zero-Blunt TOPO Cloning Kit (Life Technologies) and transformed into chemically competent Top 10 cells. Bacterial colonies were then cultured and sequenced using Sanger sequencing. Sequence results were aligned with the wt CEP290 locus for analysis.

### Example 11: AAV Transduction of Genome Editing Systems in Mouse Retinal Explants

[1494] To assess the ability of the AAV vectors described above to transduce CRISPR/Cas9 genome editing systems into retinal cells in situ, an ex vivo explant system was developed. FIG. 27A shows a representative image of an explanted mouse retina on a support matrix, with the tissue indicated by the gray arrow. Explants were harvested at 7- or 10-day time points, and histological, DNA, RNA and/or protein samples were produced. FIG. 27B shows a representative fluorescence micrograph from a retinal explant treated with an AAV vector carrying a GFP reporter, demonstrating successful transduction of an AAV payload in cells in multiple layers of the retina.

[1495] mRNA samples taken from retinal explants further demonstrate that genome editing systems according to the present disclosure are effectively transduced by these AAV vectors: FIG. 28A and FIG. 28B show expression of Cas9 mRNA and gRNA, respectively, normalized to the expression of GAPDH. As expected, untreated samples did not express Cas9 or gRNA, and gRNA was not detected in samples that were not transduced with gRNA coding sequences. Cas9 expression was observed in three AAV constructs in which Cas9 expression was driven by hGRK1, CMV or EFS promoters. The observation of Cas9 mRNA and gRNA in samples transduced with vectors in which Cas9 expression is driven by the retinal photoreceptor cell specific hGRK1 promoter indicates that these vectors can transduce genome editing systems in photoreceptor cells in situ.

[1496] DNA samples from retinal explants treated with AAV vectors were sequenced, and indel species were identified. The AAV vectors used in the mouse explant system included guides with targeting domains specific to the mouse CEP290 gene but targeted to the same region of intron 26 as the human guides presented above; aside from the specific guide sequences used, the AAV vectors used were the same as those described above. Table 30 shows a wild type (WT) mouse sequence, with left and right guide sequences italicized, and three representative indels of +1, −4 and −246 aligned with the WT sequence. In the table, three periods ( . . . ) represent an abbreviation of the sequence read for ease of presentation, while dashes (-) represent alignment gaps and underlined nucleotides represent insertions. Insofar as DNA sequencing of explants treated with AAV vectors utilizing the photoreceptor specific hGRK1 promoter revealed indel formation, these data demonstrate genome editing of a CEP290 target site in retinal photoreceptors.

TABLE 30
Representative Indels in Mouse Retinal Explants

| | |
|---|---|
| WT | CCCTCAAACACATGTCTCACGCAGCTTAGACATTCT...CAGAACTCGGTCAG-CATGCTACAGATAGCTTATCT |
| | (SEQ ID NO: 2788) (SEQ ID NO: 2789) |
| +1 | CCCTCAAACACATGTCTCACGCAGCTTAGACATTCT...CAGAACTCGGTCAGGCATGCTACAGATAGCTTATCT |
| | (SEQ ID NO: 2788) (SEQ ID NO: 2790) |
| −4 | CCCTCAAACACATGTCTCACGCAGCTTAGACATTCT...CAGAACTCGG-----CATGCTACAGATAGCTTATCT |
| | (SEQ ID NO: 2788) (SEQ ID NO: 2791) |
| −246 | CCCTCAAAG---------------------------...---------------CATGCTACAGATAGCTTATCT |
| | (SEQ ID NO: 2792) (SEQ ID NO: 2793) |

[1497] FIG. 29 summarizes the estimated frequencies of particular editing events in individual mouse explants transduced with AAV vectors according to the present disclosure. In samples transduced with AAV vectors in which Cas9 expression was driven by the hGRK1 promoter, deletions of sequences between gRNAs (guide sites) were consistently observed, as were indels at one of the two guide sites. Indels at one of the two guide sites were also observed in explants transduced with CMV and EFS vectors.

[1498] Taken together, these results demonstrate the transduction of CRISPR/Cas9 genome editing systems into cells, including photoreceptor cells, in the intact mouse retina and the editing (including deletion) of a CEP290 target site in retinal photoreceptors in situ.

### Example 12: AAV Transduction of Genome Editing Systems in Primate Retina In Vivo

[1499] To assess the ability of the AAV vectors described above to transduce CRISPR/Cas9 genome editing systems into retinal cells in vivo, a primate subretinal injection procedure was developed. Cynomolgus macaques received a bilateral subretinal injections of an AAV5 vector encoding S. aureus Cas9 operably linked to an EFS, CMV or hGRK promoter sequence, and gRNAs C1 and C2, targeted to an intronic region of the cynomolgus CEP290 gene and comprising targeting sequences as set forth in SEQ ID NOs: 2794 and 2796 respectively (see Table 31). AAV injections were given at dosages of 4×10¹⁰ (low) or 4×10¹¹ (high) viral genomes (vg). Experimental conditions are summarized in Table 32.

TABLE 31
Cynomolgus gRNA Targeting Domain Sequences

| | Targeting Domain | Targeting Domain |
|---|---|---|
| Guide | Sequence (DNA) | Sequence (RNA) |
| C1 | GGCCGGCTAATTTAGTAGAGA | GGCCGGCUAAUUUAGUAGAGA |
| | (SEQ ID NO: 2794) | (SEQ ID NO: 2795) |
| C2 | GTTATGAAGAATAATACAAA | GUUAUGAAGAAUAAUACAAA |
| | (SEQ ID NO: 2796) | (SEQ ID NO: 2797) |

TABLE 32
Cynomolgus Treatment Conditions

| Group | Vector | Dose (vg/eye) |
|---|---|---|
| CMV-low | CEPgRNAs-dCMV-Cas9 | 4 × 10¹⁰ |
| CMV- | CEPgRNAs-dCMV-Cas9 | 4 × 10¹¹ |
| high | | |
| EFS-low | CEPgRNAs-EFS-Cas9 | 4 × 10¹⁰ |
| EFS-high | CEPgRNAs-EFS-Cas9 | 4 × 10¹¹ |
| GRK-low | CEPgRNAs-GRK1-Cas9 | 4 × 10¹⁰ |
| GRK-high | CEPgRNAs-GRK1-Cas9 | 4 × 10¹¹ |
| Vehicle | GRK1-GFP/Vehicle | 4 × 10¹¹ |

[1500] 6 or 8 mm retinal tissue punches were obtained from AAV-treated and Vehicle-treated retinas at 6 and 13 weeks post injection, and genomic DNA was harvested. Sequencing was performed by using a proprietary methodology (Uni-Directional Targeted Sequencing, or UDiTaS) described in commonly assigned, copending U.S. Provisional Patent Application No. 62/443,212, which is incorporated by reference herein in its entirety. Data from two UDiTaS sequencing reactions with individual upstream or downstream primers was combined by assuming complete overlap of indels at the two different gRNA cut sites and by averaging the rates of inversions and deletions observed in the two sequencing reactions.

[1501] Histological analysis demonstrated successful transduction of primate photoreceptor cells using genome editing systems as disclosed herein. FIG. 27C depicts Cas9 antibody staining in a vehicle-control tissue punch from a primate retina, while FIG. 27D shows Cas9 expression in a punch from a primate retina treated with an AAV5 vector encoding S. aureus Cas9 operably linked to an hGRK promoter sequence. The figures show that the outer nuclear layer (ONL) in the AAV5 vector-treated punch contains Cas9 protein, while the ONL from the vehicle control punch does not. This demonstrates successful transduction of cells in this layer. No detectable Cas9 expression was detected in cells outside the ONL. Because the hGRK promoter is photoreceptor specific, these data indicate that the systems and methods of this disclosure result in Cas9 expression among retinal photoreceptor cells in primates.

[1502] FIG. 30 shows the frequency with which specific edits (indels, insertions, deletions and inversions, were observed in each condition. In both the CMV-high and GRK-high conditions, the frequency of editing events approached or exceeded 40% of reads at the 13-week timepoints. Frequencies of specific edits observed in each experimental condition at each timepoint are listed in Table 33, below. 13 weeks timepoints for the EFS-high condition were not obtained.

TABLE 33
Editing Frequencies Observed in Cynomolgus
Treatment Conditions at 6 and 13 Weeks

| | | Total | Inver- | | | |
|---|---|---|---|---|---|---|
| | | editing | sions | Deletions | Insertions | Indels |
| EFS-low | 6 week | 2.4% | 0.6% | 0.4% | 0.3% | 1.1% |
| | 13 week | 3.8% | 1.2% | 0.6% | 0.0% | 2.0% |
| EFS-high | 6 week | 10.2% | 1.4% | 1.3% | 2.3% | 5.3% |
| | 13 week | — | — | — | — | — |
| CMV-low | 6 week | 1.1% | 0.5% | 0.0% | 0.1% | 0.5% |
| | 13 week | 13.4% | 3.7% | 2.1% | 0.9% | 6.6% |
| CMV-high | 6 week | 8.0% | 0.7% | 0.7% | 2.1% | 4.4% |
| | 13 week | 44.5% | 5.1% | 3.7% | 11.2% | 24.5% |
| GRK-low | 6 week | 5.0% | 0.9% | 0.7% | 0.7% | 2.7% |
| | 13 week | 1.6% | 0.0% | 0.0% | 0.3% | 1.3% |
| GRK-high | 6 week | 16.6% | 2.5% | 2.5% | 3.5% | 8.1% |
| | 13 week | 38.0% | 7.0% | 8.5% | 5.9% | 16.7% |

[1503] It should be noted that the hGRK1 promoter is photoreceptor specific, and that the genome editing system encoded by the AAV5 vector would only be functional in photoreceptor cells. It is reasonable to conclude, therefore, that the percentages of reads obtained from tissue punches, which include other retinal cell types, are lower than the percentages that would be observed in photoreceptor cells alone. Together, these data demonstrate transduction of a CRISPR/Cas9 system into a primate retina by subretinal injection of AAV, in vivo, and the generation of targeted alterations in a CEP290 gene sequence in primate photoreceptor cells in vivo.

### Example 13: Correction of IVS26 Splicing Defect by Inversions and Deletions

[1504] To verify that deletions and inversions of the intronic region including the IVS26 mutation correct the splicing defect observed in CEP290 associated disease, a reporter assay was developed utilizing four reporter constructs having the general design depicted in FIG. 31A: pAD26_SplitGFP+WildType_CEP290_Kan (SEQ ID NO: 2798); pAD27_SplitGFP+Mutant_CEP290_Kan (SEQ ID NO: 2799); pAD28_SplitGFP+Mutant_CEP290_Inverted_Kan (SEQ ID NO: 2800); and pAD29_SplitGFP+DeletionCEP290_Kan (SEQ ID NO: 2801). These constructs were transfected into U20S cells at the concentrations shown in FIG. 31B, and GFP and mCherry expression was quantitated for each condition across three bioreplicates. Each of the four reporter constructs included a sequence encoding a split-green-fluorescent protein (GFP) reporter gene incorporating a 2217 bp human CEP 290 intron sequence corresponding to (a) wild type (WT), (b) the IVS26 mutation, (c) a deletion of the intronic sequence between two human CEP290 target sites, including the IVS26 mutation and the cryptic exon observed in mRNAs from subjects with CEP290 associated disease, as would result from the use of a genome editing system according to the present disclosure, or (d) an inversion of the intronic sequence between the two human CEP290 target sites, including the IVS26 mutation and the cryptic exon as would result from the use of a genome editing system of this disclosure. The construct is designed such that correct splicing is necessary for GFP expression. Thus, the presence of the cryptic splice acceptor site in the IVS26 condition, but not the WT condition, will result in disrupted GFP transcripts encoding non-functional GFP proteins; modifications at CEP290 target sites that result in the removal or alteration of the IVS26 mutation would rescue the expression of functional GFP protein. As shown in FIG. 31B, functional GFP protein is expressed at a high baseline level in cells treated with the WT construct, expression is reduced in the IVS26 condition, and is returned to the WT baseline level in the deletion and inversion conditions. These data indicate that the aberrant mRNA splicing caused by the IVS26 mutation is rescued by either deletion or inversion of the intronic sequence comprising that mutation.

### Example 14: AAV5 Transduction of Genome Editing Systems in Human Retinal Explants

[1505] To further establish that the genome editing systems of the present disclosure supported targeted gene editing in human retinal cells, e.g., fully mature human photoreceptors in situ, an ex vivo human retina explant system was developed. Purified AAV5 vectors were selected that encoded S. aureus Cas9 operably linked to an hGRK1 or CMV promoter sequence and first and second gRNAs comprising targeting sequences according to SEQ ID NOs: 389 and 388, respectively, and backbone sequences according to SEQ ID NO: 2787. As discussed above, these guides are targeted to the intronic region of the CEP290 gene on opposite sides of the IVS26 A>G mutation (Table 28). Human cadaver donor eyes were obtained within approximately 5 hours post-mortem and 3 mm punches were immobilized on a culture substrate as described above. Retinal explants were treated with AAV vectors at either a low dose of 1×10¹¹ vg or a high dose of 5×10¹¹ vg. Experimental conditions are summarized in Table 34.

TABLE 34
Human Treatment Conditions

| Group | Vector | Dose (vg/punch) |
|---|---|---|
| CMV-low | CEPgRNAs-dCMV-Cas9 | 1 × 10¹¹ |
| CMV- | CEPgRNAs-dCMV-Cas9 | 5 × 10¹¹ |
| high | | |
| GRK-low | CEPgRNAs-GRK1-Cas9 | 1 × 10¹¹ |
| GRK-high | CEPgRNAs-GRK1-Cas9 | 5 × 10¹¹ |
| Vehicle | GRK1-GFP/Vehicle | 5 × 10¹¹ |

[1506] DNA samples from human retinal explants treated with AAV vectors were sequenced at either 14 or 28 days post-transduction, and inversions and deletions were identified. FIG. 32 summarizes the productive editing observed in human retinal explants 14 and 28 days after transduction with the various AAV vectors. Productive editing was defined as total edits (equal to the sum of the rates of inversions and deletions) capable of correcting the LCA10-associated splice mutation in the CEP290 gene (FIG. 32). The most productive editing was observed at 16.4% at the 28 day time point for the GRK-high condition. These data demonstrate transduction of a CRISPR/Cas9 system into a human retina by subretinal injection of AAV and the generation of targeted alterations in a CEP290 gene sequence in human photoreceptor cells in situ.

### Example 15: AAV5 Transduction of Genome Editing Systems in Live Transgenic IVS26 Knock-in Mice

[1507] To further establish that the genome editing systems of the present disclosure supported targeted gene editing of the human CEP290 target position in mature photoreceptors in vivo, an IVS26 12 KI mouse model was employed. In this model, the human CEP290 exon 26, intron 26 with the IVS26 mutation (13 c.2991+1655A>G) and exon 27 have been inserted into the murine CEP290 gene via homologous recombination. AAV5 vectors encoding (i) S. aureus Cas9 operably linked to the photoreceptor-specific hGRK1 promoter sequence, and (ii) first and second gRNAs comprising targeting sequences according to SEQ ID NOs: 389 and 388, respectively, and having gRNA backbone sequences according to SEQ ID NO: 2787 were used as described in Example 14. The vectors were administered subretinally (toward the temporal side of the retina near the optic nerve) in both eyes of each animal at doses of 1×10¹¹ vg/mL, 1×10¹² vg/mL or 1×10¹³ vg/mL; a vehicle group (containing BSS with 0.014% Tween20) was also used in the study as a control. Subretinal injections were conducted in anesthetized mice in accordance with NIH animal care guidelines. For each injection, a blunt-ended needle (33-gauge, 0.5 in; Hamilton company) on a 5 ml Hamilton syringe was inserted through the scleral incision, posterior to the lens, and was advanced centrally toward the temporal retina until resistance was felt. Care was taken to avoid the damaging the lens as the cannula was advanced. A volume of 1 microliter of AAV formulation or vehicle control containing 0.2 mg/mL of fluorescein was injected into the subretinal space, forming a bleb; fluorescein was used to visualize the bleb and to confirm successful injection. Animals were euthanized at 6- and 12-week timepoints, and retinal genomic DNA and RNA were isolated for determining the gene editing efficiency (by UDiTaS) and Cas9/gRNA levels (by RT PCR), respectively. Experimental conditions are summarized in Table 35, along with rates of insertion and deletion from individual retinas as measured by UDiTaS.

TABLE 35
Inversion and Deletion Rates in IVS26 KI Mouse Retinas

| | Dose | | | |
|---|---|---|---|---|
| | 1 × 10¹² vg | | 1 × 10¹³ vg | |
| | Timepoint | | | |
| | 6 weeks | 12 weeks | 6 weeks | 12 weeks |
| Inversions | 4.68% | 3.91% | 2.06% | 1.88% |
| Deletions | 6.29% | 5.27% | 7.79% | 4.13% |

[1508] These data provide further demonstrate the successful transduction of retinal photoreceptor cells and alteration of the LCA10 target position using the vectors and genome editing systems of the present disclosure.

### Example 16: Treatment of Inherited Retinal Dystrophy (e.g., LCA) in Humans Using Recombinant Viral Vectors in Combination with Corticosteroids

[1509] The recombinant viral vectors disclosed herein may be used for the treatment of an Inherited Retinal Dystrophy, such as LCA, in a patient in need thereof. In certain embodiments, the patient may have a mutation in the CEP290 gene. For example, the patient may have a mutation in intron 26 (IVS26) of the CEP290 gene (“LCA10-IVS26”). In certain embodiments, the recombinant viral vectors disclosed herein may be used for the treatment of Inherited Retinal Dystrophy with Centrosomal Protein 290 (CEP290)-Related Retinal Degeneration Caused by a Compound Heterozygous or Homozygous Mutation Involving c.2991+1655A>G in Intron 26 (IVS26) of the CEP290 Gene in patient in need thereof. The recombinant viral vector used to treat the patient may be any of the AAV vectors disclosed herein. In certain embodiments, treatment with the AAV vector results in deletion or inversion of the mutation-containing region in the CEP290 gene, leading to improved photoreceptor and visual function. In certain embodiments, the patient may be an adult or pediatric patient.

[1510] In certain embodiments, the AAV vector may comprise one or more of the AAV vector genomes as set forth in 19A-F, 20A-20F, 21A-21F, 22A-22F, 23A-23F, 24A-24F. In certain embodiments, the AAV vector may comprise one or more of the AAV vector genomes having the configurations as illustrated in FIGS. 25A-25D. In certain embodiments, the AAV vector may comprise one or more sequences set forth in SEQ ID NOs: 428, 445, 429, 446, 430, 447, 431, 448, 432, 449, 433, 450, 2802, or 2803. The AAV vector may comprise a transgene packaged into AAV serotyped with various AAV capsids, for example, AAV5 capsids. The AAV vector may be formulated in balanced salt solution/0.001% poloxamer 188 (BSSP).

[1511] In certain embodiments, the AAV vector may be administered to the patient via sub-retinal injection in the para-foveal region. In certain embodiments, the injection may be a single injection. After completion of a pars plana vitrectomy in the eye to be treated, a subretinal bleb may be formed using the AAV vector as the infusion solution.

[1512] In certain embodiments, the patient may be administered an AAV vector at a dose of 9×10¹⁰ viral genomes (vg) to 9×10¹¹ vg (e.g., 9×10¹⁰ vg, 3×10¹¹ vg, or 9×10¹¹ vg)). For example, in certain embodiments, the AAV vector may be administered to the subject at a dose of 3×10¹¹ vg/ml to 3×10¹² vg/ml (e.g., 3×10¹¹ vg/ml, 1×10¹² vg/ml, or 3×10¹² vg/ml). In certain embodiments, the dose may be administered to the patient in a suitable volume (e.g., 0.3 mL).

[1513] To mitigate ocular inflammation and associated discomfort, the patient may be administered one or more corticosteroids before, at the same time and/or after administration of the AAV vector. In certain embodiments, the corticosteroid may be an oral corticosteroid (e.g., oral prednisone). In certain embodiments, the patient may be administered the corticosteroid prior to administration of the AAV vector. For example, the patient may be administered the corticosteroid in the days prior to administration of the AAV vector (e.g., 3 days prior to administration of the AAV vector). For example, the corticosteroid treatment may be administered beginning 3 days prior to until 6 weeks after administration of the AAV vector. In certain embodiments, the treatment of corticosteroids may be 0.5 mg/kg/day for 4 weeks, followed by a 15-day taper (0.4 mg/kg/day for 5 days, and then 0.2 mg/kg/day for 5 days, and then 0.1 mg/kg/day for 5 days). The dose of corticosteroid may be changed according to how the patient reacts to the AAV vector. For example, if there is an increase in vitreous inflammation by 1+ on the grading scale while the patient is receiving the 0.5 mg/kg/day dose (i.e., within 4 weeks after surgery), the corticosteroid dose may be may be increased to 1 mg/kg/day. If any inflammation is present within 4 weeks after surgery, the taper may be delayed.

[1514] Primary endpoints may include (a) the incidence of dose-limiting toxicity (DLT), such as macular holes, intraocular inflammation, corneal abrasion, corneal edema, decreased visual acuity, vitreous hemorrhage, subretinal hemorrhage, elevated intraocular pressure, eye pain, eye irritation, dry eye, retinal detachment, cataract, endophthalmitis, and ocular infection; (b) number of adverse events related to the AAV vector; and (c) the number of procedural adverse events. Secondary endpoints may include one or more of the following: (a) maximum tolerated dose as determined by DLT, (b) change from baseline in (i) mobility course score, (ii) log MAR measurement of best-corrected visual acuity, (iii) the rate of change, decrease in latency, or absolute change in pupil size following response to light, (iv) dark adapted visual sensitivity, (v) the thickness of the outer nuclear layer, (vi) the Pelli-Robson assessment (vii) macular sensitivity, (viii) Farnsworth 15 score, (ix) retinal function that is measurable by mfERG, (x) age-range specific quality of life instrument and participant Global Impressions of Change and Severity.

### INCORPORATION BY REFERENCE

[1515] All publications, patents, and patent applications mentioned herein are hereby incorporated by reference in their entirety as if each individual publication, patent or patent application was specifically and individually indicated to be incorporated by reference. In case of conflict, the present application, including any definitions herein, will control.

### EQUIVALENTS

[1516] Those skilled in the art will recognize, or be able to ascertain using no more than routine experimentation, many equivalents to the specific embodiments of the invention described herein. Such equivalents are intended to be encompassed by the following claims.

### REFERENCES

[1517] 1. Altschul et al. Nucleic Acids Res 25(17):3389-3402 (1977)
[1518] 2. Altschul et al. J Mol Biol 215(3):403-410 (1990)
[1519] 3. Ambati et al. Invest Ophthalmol Vis Sci 41(5):1181-1185 (2000a)
[1520] 4. Ambati et al. Invest Ophthalmol Vis Sci 41(5):1186-1191 (2000b)
[1521] 5. Anders et al. Nature 513(7519):569-573 (2014)
[1522] 6. Baal et al. Am J Hum Genet 81(1):170-179 (2007)
[1523] 7. Bae et al. Bioinformatics 30(10):1473-1475 (2014)
[1524] 8. Bainbridge et al. N Engl J Med 358(21):2231-2239 (2008)
[1525] 9. Briner et al. Mol Cell 56(2):333-339 (2014)
[1526] 10. Chylinski et al. RNA Biol 10(5):726-737 (2013)
[1527] 11. Cideciyan et al. Proc Natl Acad Sci USA 105(39):15112-15117 (2008)
[1528] 12. Cong et al. Science 339(6121):819-823 (2013)
[1529] 13. Coppieters et al. Hum Mutat 31(10):E1709-E1766 (2010)
[1530] 14. Cornish-Bowden Nucleic Acids Res 13(9):3021-3030 (1985)
[1531] 15. Davis & Maizels Proc Natl Acad Sci USA 111(10):E924-E932 (2014)
[1532] 16. den Hollander et al. Am J Hum Genet 79(3):556-561 (2006)
[1533] 17. den Hollander et al. Prog Retin Eye Res 27(4):391-419 (2008)
[1534] 18. Deveau et al. J Bacteriol 190(4):1390-1400 (2008)
[1535] 19. den Hollander et al. J Clin Invest 120(9):3042-3053 (2010)
[1536] 20. Estrada-Cuzcano et al., Invest Ophthalmol Vis Sci. 52(2): 834-9, 2011
[1537] 21. Esvelt et al. Nature 472(7344):499-503 (2011)
[1538] 22. Fine et al. Sci Rep 5:10777 (2015)
[1539] 23. Frit et al. DNA Repair (Amst.) 17:81-97 (2014)
[1540] 24. Fu et al. Nat Biotechnol 32(3):279-284 (2014)
[1541] 25. Haft et al. PLoS Comput Biol 1(6):e60 (2005)
[1542] 26. Hauswirth et al. N Engl J Med 358(21):2240-2248 (2008)
[1543] 27. Heigwer et al. Nat Methods 11(2):122-123 (2014)
[1544] 28. Helou et al. J Med Genet 44(10):657-663 (2007)
[1545] 29. Horvath et al. Science 327(5962):167-170 (2010)
[1546] 30. Hou et al. Proc Natl Acad Sci USA 110(39):15644-15649 (2013)
[1547] 31. Hsu et al. Nat Biotechnol 31(9):827-832 (2013)
[1548] 32. Iyama & Wilson DNA Repair (Amst.) 12(8):620-636 (2013)
[1549] 33. Jiang et al. Nat Biotechnol 31(3):233-239 (2013)
[1550] 34. Jinek et al. Science 337(6096):816-821 (2012)
[1551] 35. Jinek et al. Science 343(6176):1247997 (2014)
[1552] 36. Karvelis et al. RNA Biol 10(5):841-851 (2013)
[1553] 37. Kleinstiver et al. Nature 523(7561):481-485 (2015a)
[1554] 38. Kleinstiver et al. Nat Biotechnol 33(12):1293-1298 (2015b)
[1555] 39. Kleinstiver et al. Nature 529(7587):490-495 (2016)
[1556] 40. Koenekoop et al. Clin Exp Ophthalmol 35(5):473-485 (2007)
[1557] 41. Komor et al. Nature 533(7603):420-424 (2016)
[1558] 42. Leber Archiv für Ophthalmologie (in German) 15(3):1-25 (1869)
[1559] 43. Li Cell Res 18(1):85-98 (2008)
[1560] 44. Littink et al. Invest Ophthalmol Vis Sci 51(7):3646-3652 (2010)
[1561] 45. Maguire et al. N Engl J Med 358(21):2240-2248 (2008)
[1562] 46. Maguire et al. Lancet 374(9701):1597-1605 (2009)
[1563] 47. Makarova et al. Nat Rev Microbiol 9(6):467-477 (2011)
[1564] 48. Mali et al. Science 339(6121):823-826 (2013)
[1565] 49. Marteijn et al. Nat Rev Mol Cell Biol 15(7):465-481 (2014)
[1566] 50. Myers & Miller Comput Appl Biosci 4(1): 11-17 (1988)
[1567] 51. Needleman & Wunsch J Mol Biol 48(3):443-453 (1970)
[1568] 52. Nishimasu et al. Cell 156(5):935-949 (2014)
[1569] 53. Nishimasu et al. Cell 162(5):1113-1126 (2015)
[1570] 54. Pearson & Lipman Proc Natl Acad Sci USA 85(8):2444-2448 (1988)
[1571] 55. Perrault et al. Hum Mutat 28(4):416 (2007)
[1572] 56. Ran et al. Cell 154(6):1380-1389 (2013)
[1573] 57. Smith & Waterman Adv Appl Math 2(4):482-489 (1981)
[1574] 58. Sternberg et al. Nature 507(7490):62-67 (2014)
[1575] 59. Stone Am J Ophthalmol 144(6):791-811 (2007)
[1576] 60. Stone Opthamology 124(9):1314-1331 (2017)
[1577] 61. Tsai et al. Nat Biotechnol 34(5):483 (2016)
[1578] 62. Valente et al. Nat Genet 38(6):623-625 (2006)
[1579] 63. Wang et al. Cell 153(4):910-918 (2013)
[1580] 64. Xiao et al. Bioinformatics 30(8):1180-1182 (2014)
[1581] 65. Zetsche et al. Nat Biotechnol 33(2):139-142 (2015)

1-568. (canceled)

569. A method of treating LCA10 in a subject in need thereof comprising administering to the subject:
a steroid; and
a viral vector comprising a nucleotide sequence encoding a first guide RNA (gRNA) molecule comprising a first targeting domain complementary with a first target domain from the CEP290 gene and a nucleotide sequence encoding a Cas9 molecule;
wherein the viral vector is capable of delivery to a non-dividing cell, and wherein the administration results in NHEJ-mediated alteration of an LCA10 target position in one or more cells of the subject.

570. The method of claim 569, wherein the viral vector further comprises a nucleotide sequence encoding a second gRNA molecule comprising a second targeting domain complementary with a second target domain from the CEP290 gene.

571. The method of claim 569, wherein the steroid is administered prior to administering the viral vector.

572. The method of claim 569, wherein the steroid is a corticosteroid.

573. The method of claim 572, wherein the corticosteroid is an oral corticosteroid.

574. The method of claim 573, wherein the oral corticosteroid is prednisone.

575. The method of claim 569, wherein the steroid is administered daily 1 to 14 days prior to administering the viral vector.

576. The method of claim 575, wherein the steroid is further administered daily for 1 week to 10 weeks after administering the viral vector.

577. The method of claim 576, wherein the steroid is administered at a dose of 0.1 mg/kg/per day to 1 mg/kg/day.

578. The method of claim 576, wherein
(i) the steroid is administered daily at a first dose for 1 week to 10 weeks after administering the viral vector; and
(ii) the steroid is administered daily at a second dose after administration of the first dose for 1 week to 10 weeks, wherein the second dose is a dose that is less than the first dose.

579. The method of claim 578, wherein the second dose is a tapered dose.

580. The method of claim 570, wherein the first targeting domain comprises a nucleotide sequence selected from the group consisting of SEQ ID NO:530 (CEP290-323), SEQ ID NO:555 (CEP290-485), SEQ ID NO:468 (CEP290-490), and SEQ ID NO:538 (CEP290-492).

581. The method of claim 580, wherein the second targeting domain comprises a nucleotide sequence selected from the group consisting of SEQ ID NO:558 (CEP290-64), SEQ ID NO:2321 (CEP290-11), SEQ ID NO:2312 (CEP290-230), SEQ ID NO:460 (CEP290-496), SEQ ID NO:586 (CEP290-502), and SEQ ID NO:568 (CEP290-504).

582. A method of treating LCA10 in a subject in need thereof comprising administering to the subject:
a steroid; and
a recombinant viral particle comprising a nucleotide sequence encoding a first guide RNA (gRNA) molecule comprising a first targeting domain complementary with a first target domain from the CEP290 gene, a nucleotide sequence encoding a second gRNA molecule comprising a second targeting domain complementary with a second target domain from the CEP290 gene; and a nucleotide sequence encoding a Cas9 molecule;
wherein the recombinant viral particle is capable of delivery to a non-dividing cell, and wherein the administration results in NHEJ-mediated alteration of an LCA10 target position in one or more cells of the subject.

583. The method of claim 582, wherein the steroid is administered prior to the recombinant viral particle.

584. The method of claim 582, wherein the steroid is administered daily 1 to 14 days prior to administering the recombinant viral particle.

585. The method of claim 584, wherein the steroid is further administered daily for 1 week to 10 weeks after administering the recombinant viral particle.

586. The method of claim 584, wherein the steroid is administered at a dose of 0.1 mg/kg/per day to 1 mg/kg/day.

587. The method of claim 582, wherein the steroid is a corticosteroid.

588. The method of claim 587, wherein the corticosteroid is an oral corticosteroid.

589. The method of claim 588, wherein the oral corticosteroid is prednisone.

590. The method of claim 582, wherein the first targeting domain comprises a nucleotide sequence selected from the group consisting of SEQ ID NO:530 (CEP290-323), SEQ ID NO:555 (CEP290-485), SEQ ID NO:468 (CEP290-490), and SEQ ID NO:538 (CEP290-492).

591. The method of claim 590, wherein the second targeting domain comprises a nucleotide sequence selected from the group consisting of SEQ ID NO:558 (CEP290-64), SEQ ID NO:2321 (CEP290-11), SEQ ID NO:2312 (CEP290-230), SEQ ID NO:460 (CEP290-496), SEQ ID NO:586 (CEP290-502), and SEQ ID NO:568 (CEP290-504).

592. A method of treating LCA10 in a subject in need thereof comprising administering to the subject:
a steroid; and
an AAV vector comprising a nucleotide sequence encoding a first guide RNA (gRNA) molecule, a nucleotide sequence encoding a second gRNA molecule and a nucleotide sequence encoding a Cas9 molecule,
wherein the first and the second gRNA molecules are configured to form a first and a second complex with the Cas9 molecule, respectively, and
wherein the first complex forms a first DNA double strand break between the 5′ end of the Alu repeat at c.2991+1162 to c.2991.1638 of intron 26 of the CEP290 gene and 500 nucleotides upstream of said 5′ end of the Alu repeat, and the second complex forms a second DNA double strand break between an LCA10 target position and 500 nucleotides downstream of the LCA10 target position, wherein the first and second DNA double strand breaks are repaired by NHEJ in a manner that results in alteration of the LCA10 target position.

593. The method of claim 592, wherein the steroid is a corticosteroid.

594. The method of claim 593, wherein the corticosteroid is an oral corticosteroid.

595. The method of claim 594, wherein the oral corticosteroid is prednisone.

596. The method of claim 592, wherein the steroid is administered prior to administering the AAV vector.

597. The method of claim 592, wherein the AAV vector is an AAV5 vector.

598. The method of claim 597, wherein the steroid is administered daily 1 to 14 days prior to administering the AAV vector.

599. The method of claim 598, wherein the steroid is further administered daily for 1 week to 10 weeks after administering the AAV vector.

600. The method of claim 599, wherein the steroid is administered at a dose of 0.1 mg/kg/per day to 1 mg/kg/day.

601. The method of claim 592, wherein the nucleotide sequence encoding a first gRNA molecule comprises a nucleotide sequence selected from the group consisting of SEQ ID NO:530 (CEP290-323), SEQ ID NO:555 (CEP290-485), SEQ ID NO:468 (CEP290-490), and SEQ ID NO:538 (CEP290-492).

602. The method of claim 601, wherein the nucleotide sequence encoding a second gRNA molecule comprises a nucleotide sequence selected from the group consisting of SEQ ID NO:558 (CEP290-64), SEQ ID NO:2321 (CEP290-11), SEQ ID NO:2312 (CEP290-230), SEQ ID NO:460 (CEP290-496), SEQ ID NO:586 (CEP290-502), and SEQ ID NO:568 (CEP290-504).

The application's sequence listing, which the Patent Office published only in electronic form, follows.

SEQUENCE LISTING (2803 sequences)

SEQ ID NO: 1 - protein, 1345 aa, Streptococcus mutans
MKKPYSIGLDIGTNSVGWAVVTDDYKVPAKKMKVLGNTDKSHIEKNLLGALLFDSGNTAEDRRLKRTARRRYTRRRNRILYLQEIFSEEMGKVDDSFFHRLEDSFLVTEDKRGERHPIFGNLEEEVKYHENFPTIYHLRQYLADNPEKVDLRLVYLALAHIIKFRGHFLIEGKFDTRNNDVQRLFQEFLAVYDNTFENSSLQEQNVQVEEILTDKISKSAKKDRVLKLFPNEKSNGRFAEFLKLIVGNQADFKKHFELEEKAPLQFSKDTYEEELEVLLAQIGDNYAELFLSAKKLYDSILLSGILTVTDVGTKAPLSASMIQRYNEHQMDLAQLKQFIRQKLSDKYNEVFSDVSKDGYAGYIDGKTNQEAFYKYLKGLLNKIEGSGYFLDKIEREDFLRKQRTFDNGSIPHQIHLQEMRAIIRRQAEFYPFLADNQDRIEKLLTFRIPYYVGPLARGKSDFAWLSRKSADKITPWNFDEIVDKESSAEAFINRMTNYDLYLPNQKVLPKHSLLYEKFTVYNELTKVKYKTEQGKTAFFDANMKQEIFDGVFKVYRKVTKDKLMDFLEKEFDEFRIVDLTGLDKENKVFNASYGTYHDLCKILDKDFLDNSKNEKILEDIVLTLTLFEDREMIRKRLENYSDLLTKEQVKKLERRHYTGWGRLSAELIHGIRNKESRKTILDYLIDDGNSNRNFMQLINDDALSFKEEIAKAQVIGETDNLNQVVSDIAGSPAIKKGILQSLKIVDELVKIMGHQPENIVVEMARENQFTNQGRRNSQQRLKGLTDSIKEFGSQILKEHPVENSQLQNDRLFLYYLQNGRDMYTGEELDIDYLSQYDIDHIIPQAFIKDNSIDNRVLTSSKENRGKSDDVPSKDVVRKMKSYWSKLLSAKLITQRKFDNLTKAERGGLTDDDKAGFIKRQLVETRQITKHVARILDERFNTETDENNKKIRQVKIVTLKSNLVSNFRKEFELYKVREINDYHHAHDAYLNAVIGKALLGVYPQLEPEFVYGDYPHFHGHKENKATAKKFFYSNIMNFFKKDDVRTDKNGEIIWKKDEHISNIKKVLSYPQVNIVKKVEEQTGGFSKESILPKGNSDKLIPRKTKKFYWDTKKYGGFDSPIVAYSILVIADIEKGKSKKLKTVKALVGVTIMEKMTFERDPVAFLERKGYRNVQEENIIKLPKYSLFKLENGRKRLLASARELQKGNEIVLPNHLGTLLYHAKNIHKVDEPKHLDYVDKHKDEFKELLDVVSNFSKKYTLAEGNLEKIKELYAQNNGEDLKELASSFINLLTFTAIGAPATFKFFDKNIDRKRYTSTTEILNATLIHQSITGLYETRIDLNKLGGD

SEQ ID NO: 2 - protein, 1368 aa, Streptococcus pyogenes [sequence omitted]

SEQ ID NO: 3 - protein, 1388 aa, Streptococcus thermophilus
MTKPYSIGLDIGTNSVGWAVTTDNYKVPSKKMKVLGNTSKKYIKKNLLGVLLFDSGITAEGRRLKRTARRRYTRRRNRILYLQEIFSTEMATLDDAFFQRLDDSFLVPDDKRDSKYPIFGNLVEEKAYHDEFPTIYHLRKYLADSTKKADLRLVYLALAHMIKYRGHFLIEGEFNSKNNDIQKNFQDFLDTYNAIFESDLSLENSKQLEEIVKDKISKLEKKDRILKLFPGEKNSGIFSEFLKLIVGNQADFRKCFNLDEKASLHFSKESYDEDLETLLGYIGDDYSDVFLKAKKLYDAILLSGFLTVTDNETEAPLSSAMIKRYNEHKEDLALLKEYIRNISLKTYNEVFKDDTKNGYAGYIDGKTNQEDFYVYLKKLLAEFEGADYFLEKIDREDFLRKQRTFDNGSIPYQIHLQEMRAILDKQAKFYPFLAKNKERIEKILTFRIPYYVGPLARGNSDFAWSIRKRNEKITPWNFEDVIDKESSAEAFINRMTSFDLYLPEEKVLPKHSLLYETFNVYNELTKVRFIAESMRDYQFLDSKQKKDIVRLYFKDKRKVTDKDIIEYLHAIYGYDGIELKGIEKQFNSSLSTYHDLLNIINDKEFLDDSSNEAIIEEIIHTLTIFEDREMIKQRLSKFENIFDKSVLKKLSRRHYTGWGKLSAKLINGIRDEKSGNTILDYLIDDGISNRNFMQLIHDDALSFKKKIQKAQIIGDEDKGNIKEVVKSLPGSPAIKKGILQSIKIVDELVKVMGGRKPESIVVEMARENQYTNQGKSNSQQRLKRLEKSLKELGSKILKENIPAKLSKIDNNALQNDRLYLYYLQNGKDMYTGDDLDIDRLSNYDIDHIIPQAFLKDNSIDNKVLVSSASNRGKSDDVPSLEVVKKRKTFWYQLLKSKLISQRKFDNLTKAERGGLSPEDKAGFIQRQLVETRQITKHVARLLDEKFNNKKDENNRAVRTVKIITLKSTLVSQFRKDFELYKVREINDFHHAHDAYLNAVVASALLKKYPKLEPEFVYGDYPKYNSFRERKSATEKVYFYSNIMNIFKKSISLADGRVIERPLIEVNEETGESVWNKESDLATVRRVLSYPQVNVVKKVEEQNHGLDRGKPKGLFNANLSSKPKPNSNENLVGAKEYLDPKKYGGYAGISNSFTVLVKGTIEKGAKKKITNVLEFQGISILDRINYRKDKLNFLLEKGYKDIELIIELPKYSLFELSDGSRRMLASILSTNNKRGEIHKGNQIFLSQKFVKLLYHAKRISNTINENHRKYVENHKKEFEELFYYILEFNENYVGAKKNGKLLNSAFQSWQNHSIDELCSSFIGPTGSERKGLFELTSRGSAADFEFLGVKIPRYRDYTPSSLLKDATLIHQSVTGLYETRIDLAKLGEG

SEQ ID NO: 4 - protein, 1333 aa, Listeria innocua
KKPYTIGLDIGTNSVGWAVLTDQYDLVKRKMKIAGDSEKKQIKKNFWGVRLFDEGQTAADRRMARTARRRIERRRNRISYLQGIFAEEMSKTDANFFCRLSDSFYVDNEKRNSRHPFFATIEEEVEYHKNYPTIYHLREELVNSSEKADLRLVYLALAHIIKYRGNFLIEGALDTQNTSVDGIYKQFIQTYNQVFASGIEDGSLKKLEDNKDVAKILVEKVTRKEKLERILKLYPGEKSAGMFAQFISLIVGSKGNFQKPFDLIEKSDIECAKDSYEEDLESLLALIGDEYAELFVAAKNAYSAVVLSSIITVAETETNAKLSASMIERFDTHEEDLGELKAFIKLHLPKHYEEIFSNTEKHGYAGYIDGKTKQADFYKYMKMTLENIEGADYFIAKIEKENFLRKQRTFDNGAIPHQLHLEELEAILHQQAKYYPFLKENYDKIKSLVTFRIPYFVGPLANGQSEFAWLTRKADGEIRPWNIEEKVDFGKSAVDFIEKMTNKDTYLPKENVLPKHSLCYQKYLVYNELTKVRYINDQGKTSYFSGQEKEQIFNDLFKQKRKVKKKDLELFLRNMSHVESPTIEGLEDSFNSSYSTYHDLLKVGIKQEILDNPVNTEMLENIVKILTVFEDKRMIKEQLQQFSDVLDGVVLKKLERRHYTGWGRLSAKLLMGIRDKQSHLTILDYLMNDDGLNRNLMQLINDSNLSFKSIIEKEQVTTADKDIQSIVADLAGSPAIKKGILQSLKIVDELVSVMGYPPQTIVVEMARENQTTGKGKNNSRPRYKSLEKAIKEFGSQILKEHPTDNQELRNNRLYLYYLQNGKDMYTGQDLDIHNLSNYDIDHIVPQSFITDNSIDNLVLTSSAGNREKGDDVPPLEIVRKRKVFWEKLYQGNLMSKRKFDYLTKAERGGLTEADKARFIHRQLVETRQITKNVANILHQRFNYEKDDHGNTMKQVRIVTLKSALVSQFRKQFQLYKVRDVNDYHHAHDAYLNGVVANTLLKVYPQLEPEFVYGDYHQFDWFKANKATAKKQFYTNIMLFFAQKDRIIDENGEILWDKKYLDTVKKVMSYRQMNIVKKTEIQKGEFSKATIKPKGNSSKLIPRKTNWDPMKYGGLDSPNMAYAVVIEYAKGKNKLVFEKKIIRVTIMERKAFEKDEKAFLEEQGYRQPKVLAKLPKYTLYECEEGRRRMLASANEAQKGNQQVLPNHLVTLLHHAANCEVSDGKSLDYIESNREMFAELLAHVSEFAKRYTLAEANLNKINQLFEQNKEGDIKAIAQSFVDLMAFNAMGAPASFKFFETTIERKRYNNLKELLNSTIIYQSITGLYESRKRLDD

SEQ ID NO: 5 - RNA, 96 nt, Artificial Sequence
  gRNA
  misc_feature (1)..(20): Targeting domain, each n is a, c, u, g, unknown, or other
nnnnnnnnnnnnnnnnnnnnguuuuagagcuagaaauagcaaguuaaaauaaggcuaguccguuaucaacuugaaaaaguggcaccgagucggugc

SEQ ID NO: 6-7 - skipped (2 entries)

SEQ ID NO: 8 - protein, 12 aa, Artificial Sequence
  N-term RuvC domain
  MISC_FEATURE (2)..(2): Ile, Val, Met, Leu, or Thr
  MISC_FEATURE (4)..(4): Thr, Ile, Val, Ser, Asn, Tyr, Glu, or Leu
  MISC_FEATURE (5)..(5): Asn, Ser, Gly, Ala, Asp, Thr, Arg, Met, or Phe
  MISC_FEATURE (6)..(6): Ser, Tyr, Asn, or Phe
  MISC_FEATURE (7)..(7): Val, Ile, Leu, Cys, Thr, or Phe
  MISC_FEATURE (9)..(9): Trp, Phe, Val, Tyr, Ser, or Leu
  MISC_FEATURE (10)..(10): Ala, Ser, Cys, Val, or Gly
  MISC_FEATURE (11)..(11): Val, Ile, Leu, Ala, Met, or His
  MISC_FEATURE (12)..(12): Any amino acid or absent
DXGXXXXGXXXX

SEQ ID NO: 9 - protein, 12 aa, Artificial Sequence
  N-term RuvC domain
  MISC_FEATURE (2)..(2): Ile, Val, Met, Leu, or Thr
  MISC_FEATURE (4)..(4): Thr, Ile, Val, Ser, Asn, Tyr, Glu, or Leu
  MISC_FEATURE (5)..(5): Asn, Ser, Gly, Ala, Asp, Thr, Arg, Met, or Phe
  MISC_FEATURE (7)..(7): Val, Ile, Leu, Cys, Thr, Phe
  MISC_FEATURE (9)..(9): Trp, Phe, Val, Tyr, Ser, or Leu
  MISC_FEATURE (10)..(10): Ala, Ser, Cys, Val, or Gly
  MISC_FEATURE (11)..(11): Val, Ile, Leu, Ala, Met, or His
  MISC_FEATURE (12)..(12): Any amino acid or absent
DXGXXSXGXXXX

SEQ ID NO: 10 - protein, 12 aa, Artificial Sequence
  N-term RuvC domain
  MISC_FEATURE (4)..(4): Thr, Ile, Val, Ser, Asn, Tyr, Glu, or Leu
  MISC_FEATURE (5)..(5): Asn, Ser, Gly, Ala, Asp, Thr, Arg, Met, or Phe
  MISC_FEATURE (11)..(11): Val, Ile, Leu, Ala, Met, or His
  MISC_FEATURE (12)..(12): Any amino acid or absent
DIGXXSVGWAXX

SEQ ID NO: 11 - protein, 12 aa, Artificial Sequence
  N-term RuvC domain
  MISC_FEATURE (12)..(12): Any non-polar alkyl amino acid or a hydroxyl amino acid
DIGTNSVGWAVX

SEQ ID NO: 12 - protein, 8 aa, Artificial Sequence
  N-term RuvC domain
  MISC_FEATURE (2)..(2): Val or His
  MISC_FEATURE (3)..(3): Ile, Leu, or Val
  MISC_FEATURE (5)..(5): Met or Thr
IXXEXARE

SEQ ID NO: 13 - protein, 8 aa, Artificial Sequence
  RuvC domain
  MISC_FEATURE (3)..(3): Ile, Leu, or Val
IVXEMARE

SEQ ID NO: 14 - protein, 8 aa, Artificial Sequence
  RuvC domain
  MISC_FEATURE (4)..(4): His or Leu
  MISC_FEATURE (7)..(7): Arg or Val
  MISC_FEATURE (8)..(8): Glu or Val
HHAXDAXX

SEQ ID NO: 15 - protein, 8 aa, Artificial Sequence
  RuvC domain
HHAHDAYL

SEQ ID NO: 16 - protein, 30 aa, Artificial Sequence
  Sequence flanking RuvC domain
  MISC_FEATURE (2)..(2): Lys or Pro
  MISC_FEATURE (4)..(4): Val, Leu, Ile, or Phe
  MISC_FEATURE (5)..(5): Gly, Ala, or Ser
  misc_feature (6)..(6): Xaa can be any naturally occurring amino acid
  MISC_FEATURE (7)..(26): Any amino acid, and region may encompass 5-20 residues wherein some positions may be absent
  MISC_FEATURE (29)..(29): Asp, Glu, Asn, or Gln
KXYXXXXXXXXXXXXXXXXXXXXXXXTDXY

SEQ ID NO: 17 - protein, 27 aa, Artificial Sequence
  HNH-like domain
  MISC_FEATURE (1)..(1): Asp, Glu, Gln, or Asn
  MISC_FEATURE (2)..(2): Leu, Ile, Arg, Gln, Val, Met, or Lys
  MISC_FEATURE (3)..(3): Asp or Glu
  MISC_FEATURE (5)..(5): Ile, Val, Thr, Ala, or Leu
  MISC_FEATURE (6)..(6): Val, Tyr, Ile, Leu, Phe, or Trp
  MISC_FEATURE (8)..(8): Gln, His, Arg, Lys, Tyr, Ile, Leu, Phe, or Trp
  MISC_FEATURE (9)..(9): Ser, Ala, Asp, Thr, or Lys
  MISC_FEATURE (10)..(10): Phe, Leu, Val, Lys, Tyr, Met, Ile, Arg, Ala, Glu, Asp, or Gln
  MISC_FEATURE (11)..(11): Leu, Arg, Thr, Ile, Val, Ser, Cys, Tyr, Lys, Phe, or Gly
  MISC_FEATURE (12)..(12): Lys, Gln, Tyr, Thr, Phe, Leu, Trp, Met, Ala, Glu, Gly, or Ser
  MISC_FEATURE (13)..(13): Asp, Ser, Asn, Arg, Leu, or Thr
  MISC_FEATURE (14)..(14): Asp, Asn, or Ser
  MISC_FEATURE (15)..(15): Ser, Ala, Thr, Gly, or Arg
  MISC_FEATURE (16)..(16): Ile, Leu, Phe, Ser, Arg, Tyr, Gln, Trp, Asp, Lys, or His
  MISC_FEATURE (17)..(17): Asp, Ser, Ile, Asn, Glu, Ala, His, Phe, Leu, Gln, Met, Gly, Tyr, or Val
  MISC_FEATURE (19)..(19): Lys, Leu, Arg, Met, Thr, or Phe
  MISC_FEATURE (20)..(20): Val, Leu, Ile, Ala, or Thr
  MISC_FEATURE (21)..(21): Leu, Ile, Val, or Ala
  MISC_FEATURE (22)..(22): Thr, Val, Cys, Glu, Ser, or Ala
  MISC_FEATURE (23)..(23): Arg, Phe, Thr, Trp, Glu, Leu, Asn, Cys, Lys, Val, Ser, Gln, Ile, Tyr, His, or Ala
  MISC_FEATURE (24)..(24): Ser, Pro, Arg, Lys, Asn, Ala, His, Gln, Gly, or Leu
  MISC_FEATURE (25)..(25): Asp, Gly, Thr, Asn, Ser, Lys, Ala, Ile, Glu, Leu, Gln, Arg, or Tyr
  MISC_FEATURE (26)..(26): Lys, Val, Ala, Glu, Tyr, Ile, Cys, Leu, Ser, Thr, Gly, Lys, Met, Asp, or Phe
XXXHXXPXXXXXXXXXXNXXXXXXXXN

SEQ ID NO: 18 - protein, 27 aa, Artificial Sequence
  HNH-like domain
  MISC_FEATURE (1)..(1): Asp or Glu
  MISC_FEATURE (2)..(2): Leu, Ile, Arg, Gln, Val, Met, or Lys
  MISC_FEATURE (3)..(3): Asp or Glu
  MISC_FEATURE (5)..(5): Ile, Val, Thr, Ala, or Leu
  MISC_FEATURE (6)..(6): Val, Tyr, Ile, Leu, Phe, or Trp
  MISC_FEATURE (8)..(8): Gln, His, Arg, Lys, Tyr, Ile, Leu, Phe, or Trp
  MISC_FEATURE (10)..(10): Phe, Leu, Val, Lys, Tyr, Met, Ile, Arg, Ala, Glu, Asp, or Gln
  MISC_FEATURE (11)..(11): Leu, Arg, Thr, Ile, Val, Ser, Cys, Tyr, Lys, Phe, or Gly
  MISC_FEATURE (12)..(12): Lys, Gln, Tyr, Thr, Phe, Leu, Trp, Met, Ala, Glu, Gly, or Ser
  MISC_FEATURE (16)..(16): Ile, Leu, Phe, Ser, Arg, Tyr, Gln, Trp, Asp, Lys, or His
  MISC_FEATURE (17)..(17): Asp, Ser, Ile, Asn, Glu, Ala, His, Phe, Leu, Gln, Met, Gly, Tyr, or Val
  MISC_FEATURE (22)..(22): Thr, Val, Cys, Glu, Ser, or Ala
  MISC_FEATURE (23)..(23): Arg, Phe, Thr, Trp, Glu, Leu, Asn, Cys, Lys, Val, Ser, Gln, Ile, Tyr, His, or Ala
  MISC_FEATURE (24)..(24): Ser, Pro, Arg, Lys, Asn, Ala, His, Gln, Gly, or Leu
  MISC_FEATURE (25)..(25): Asp, Gly, Thr, Asn, Ser, Lys, Ala, Ile, Glu, Leu, Gln, Arg, or Tyr
  MISC_FEATURE (26)..(26): Lys, Val, Ala, Glu, Tyr, Ile, Cys, Leu, Ser, Thr, Gly, Lys, Met, Asp, or Phe
XXXHXXPXSXXXDDSXXNKVLXXXXXN

SEQ ID NO: 19 - protein, 27 aa, Artificial Sequence
  HNH-like domain
  MISC_FEATURE (1)..(1): Asp or Glu
  MISC_FEATURE (3)..(3): Asp or Glu
  MISC_FEATURE (8)..(8): Gln, His, Arg, Lys, Tyr, Ile, Leu, or Trp
  MISC_FEATURE (10)..(10): Phe, Leu, Val, Lys, Tyr, Met, Ile, Arg, Ala, Glu, Asp, or Gln
  MISC_FEATURE (11)..(11): Leu, Arg, Thr, Ile, Val, Ser, Cys, Tyr, Lys, Phe, or Gly
  MISC_FEATURE (12)..(12): Lys, Gln, Tyr, Thr, Phe, Leu, Trp, Met, Ala, Glu, Gly, or Ser
  MISC_FEATURE (16)..(16): Ile, Leu, Phe, Ser, Arg, Tyr, Gln, Trp, Asp, Lys, or His
  MISC_FEATURE (17)..(17): Asp, Ser, Ile, Asn, Glu, Ala, His, Phe, Leu, Gln, Met, Gly, Tyr, or Val
  MISC_FEATURE (23)..(23): Arg, Phe, Thr, Trp, Glu, Leu, Asn, Cys, Lys, Val, Ser, Gln, Ile, Tyr, His, or Ala
  MISC_FEATURE (24)..(24): Ser, Pro, Arg, Lys, Asn, Ala, His, Gln, Gly, or Leu
  MISC_FEATURE (25)..(25): Asp, Gly, Thr, Asn, Ser, Lys, Ala, Ile, Glu, Leu, Gln, Arg, or Tyr
  MISC_FEATURE (26)..(26): Lys, Val, Ala, Glu, Tyr, Ile, Cys, Leu, Ser, Thr, Gly, Lys, Met, Asp, or Phe
XVXHIVPXSXXXDDSXXNKVLTXXXXN

SEQ ID NO: 20 - protein, 27 aa, Artificial Sequence
  HNH-like domain
  MISC_FEATURE (2)..(2): Ile or Val
  MISC_FEATURE (6)..(6): Ile or Val
  MISC_FEATURE (9)..(9): Ala or Ser
  MISC_FEATURE (11)..(11): Ile or Leu
  MISC_FEATURE (12)..(12): Lys or Thr
  MISC_FEATURE (14)..(14): Asp or Asn
  MISC_FEATURE (19)..(19): Arg, Lys, or Leu
  MISC_FEATURE (22)..(22): Thr or Val
  MISC_FEATURE (23)..(23): Ser or Arg
  MISC_FEATURE (25)..(25): Lys, Asp, or Ala
  MISC_FEATURE (26)..(26): Glu, Lys, Gly, or Asn
DXDHIXPQXFXXDXSIDNXVLXXSXXN

SEQ ID NO: 21 - protein, 73 aa, Artificial Sequence
  Synthetic polypeptide
  MISC_FEATURE (8)..(8): Lys or Arg
  MISC_FEATURE (12)..(12): Val or Thr
  MISC_FEATURE (13)..(13): Gly or Asp
  MISC_FEATURE (14)..(14): Glu, Gln, or Asp
  MISC_FEATURE (15)..(15): Glu or Asp
  MISC_FEATURE (19)..(19): Asp, Asn, or His
  MISC_FEATURE (20)..(20): Tyr, Arg, or Asn
  MISC_FEATURE (23)..(23): Gln, Asp, or Asn
  MISC_FEATURE (25)..(64): Any amino acid, and region may encompass 15-40 residues wherein some positions may be absent
  MISC_FEATURE (67)..(67): Gly or Glu
  MISC_FEATURE (69)..(69): Ser or Gly
  MISC_FEATURE (71)..(71): Asp or Asn
LYYLQNGXDMYXXXXLDIXXLSXYXXXXXXXXXXXXXXXXXXXXXXXXXXXXXXXXXXXXXXXXNRXKXDXVP

SEQ ID NO: 22 - DNA, 4107 bp, Artificial Sequence
  Codon optimized S. pyogenes Cas9
atggataaaaagtacagcatcgggctggacatcggtacaaactcagtggggtgggccgtgattacggacgagtacaaggtaccctccaaaaaatttaaagtgctgggtaacacggacagacactctataaagaaaaatcttattggagccttgctgttcgactcaggcgagacagccgaagccacaaggttgaagcggaccgccaggaggcggtataccaggagaaagaaccgcatatgctacctgcaagaaatcttcagtaacgagatggcaaaggttgacgatagctttttccatcgcctggaagaatcctttcttgttgaggaagacaagaagcacgaacggcaccccatctttggcaatattgtcgacgaagtggcatatcacgaaaagtacccgactatctaccacctcaggaagaagctggtggactctaccgataaggcggacctcagacttatttatttggcactcgcccacatgattaaatttagaggacatttcttgatcgagggcgacctgaacccggacaacagtgacgtcgataagctgttcatccaacttgtgcagacctacaatcaactgttcgaagaaaaccctataaatgcttcaggagtcgacgctaaagcaatcctgtccgcgcgcctctcaaaatctagaagacttgagaatctgattgctcagttgcccggggaaaagaaaaatggattgtttggcaacctgatcgccctcagtctcggactgaccccaaatttcaaaagtaacttcgacctggccgaagacgctaagctccagctgtccaaggacacatacgatgacgacctcgacaatctgctggcccagattggggatcagtacgccgatctctttttggcagcaaagaacctgtccgacgccatcctgttgagcgatatcttgagagtgaacaccgaaattactaaagcaccccttagcgcatctatgatcaagcggtacgacgagcatcatcaggatctgaccctgctgaaggctcttgtgaggcaacagctccccgaaaaatacaaggaaatcttctttgaccagagcaaaaacggctacgctggctatatagatggtggggccagtcaggaggaattctataaattcatcaagcccattctcgagaaaatggacggcacagaggagttgctggtcaaacttaacagggaggacctgctgcggaagcagcggacctttgacaacgggtctatcccccaccagattcatctgggcgaactgcacgcaatcctgaggaggcaggaggatttttatccttttcttaaagataaccgcgagaaaatagaaaagattcttacattcaggatcccgtactacgtgggacctctcgcccggggcaattcacggtttgcctggatgacaaggaagtcagaggagactattacaccttggaacttcgaagaagtggtggacaagggtgcatctgcccagtctttcatcgagcggatgacaaattttgacaagaacctccctaatgagaaggtgctgcccaaacattctctgctctacgagtactttaccgtctacaatgaactgactaaagtcaagtacgtcaccgagggaatgaggaagccggcattccttagtggagaacagaagaaggcgattgtagacctgttgttcaagaccaacaggaaggtgactgtgaagcaacttaaagaagactactttaagaagatcgaatgttttgacagtgtggaaatttcaggggttgaagaccgcttcaatgcgtcattggggacttaccatgatcttctcaagatcataaaggacaaagacttcctggacaacgaagaaaatgaggatattctcgaagacatcgtcctcaccctgaccctgttcgaagacagggaaatgatagaagagcgcttgaaaacctatgcccacctcttcgacgataaagttatgaagcagctgaagcgcaggagatacacaggatggggaagattgtcaaggaagctgatcaatggaattagggataaacagagtggcaagaccatactggatttcctcaaatctgatggcttcgccaataggaacttcatgcaactgattcacgatgactctcttaccttcaaggaggacattcaaaaggctcaggtgagcgggcagggagactcccttcatgaacacatcgcgaatttggcaggttcccccgctattaaaaagggcatccttcaaactgtcaaggtggtggatgaattggtcaaggtaatgggcagacataagccagaaaatattgtgatcgagatggcccgcgaaaaccagaccacacagaagggccagaaaaatagtagagagcggatgaagaggatcgaggagggcatcaaagagctgggatctcagattctcaaagaacaccccgtagaaaacacacagctgcagaacgaaaaattgtacttgtactatctgcagaacggcagagacatgtacgtcgaccaagaacttgatattaatagactgtccgactatgacgtagaccatatcgtgccccagtccttcctgaaggacgactccattgataacaaagtcttgacaagaagcgacaagaacaggggtaaaagtgataatgtgcctagcgaggaggtggtgaaaaaaatgaagaactactggcgacagctgcttaatgcaaagctcattacacaacggaagttcgataatctgacgaaagcagagagaggtggcttgtctgagttggacaaggcagggtttattaagcggcagctggtggaaactaggcagatcacaaagcacgtggcgcagattttggacagccggatgaacacaaaatacgacgaaaatgataaactgatacgagaggtcaaagttatcacgctgaaaagcaagctggtgtccgattttcggaaagacttccagttctacaaagttcgcgagattaataactaccatcatgctcacgatgcgtacctgaacgctgttgtcgggaccgccttgataaagaagtacccaaagctggaatccgagttcgtatacggggattacaaagtgtacgatgtgaggaaaatgatagccaagtccgagcaggagattggaaaggccacagctaagtacttcttttattctaacatcatgaatttttttaagacggaaattaccctggccaacggagagatcagaaagcggccccttatagagacaaatggtgaaacaggtgaaatcgtctgggataagggcagggatttcgctactgtgaggaaggtgctgagtatgccacaggtaaatatcgtgaaaaaaaccgaagtacagaccggaggattttccaaggaaagcattttgcctaaaagaaactcagacaagctcatcgcccgcaagaaagattgggaccctaagaaatacgggggatttgactcacccaccgtagcctattctgtgctggtggtagctaaggtggaaaaaggaaagtctaagaagctgaagtccgtgaaggaactcttgggaatcactatcatggaaagatcatcctttgaaaagaaccctatcgatttcctggaggctaagggttacaaggaggtcaagaaagacctcatcattaaactgccaaaatactctctcttcgagctggaaaatggcaggaagagaatgttggccagcgccggagagctgcaaaagggaaacgagcttgctctgccctccaaatatgttaattttctctatctcgcttcccactatgaaaagctgaaagggtctcccgaagataacgagcagaagcagctgttcgtcgaacagcacaagcactatctggatgaaataatcgaacaaataagcgagttcagcaaaagggttatcctggcggatgctaatttggacaaagtactgtctgcttataacaagcaccgggataagcctattagggaacaagccgagaatataattcacctctttacactcacgaatctcggagcccccgccgccttcaaatactttgatacgactatcgaccggaaacggtataccagtaccaaagaggtcctcgatgccaccctcatccaccagtcaattactggcctgtacgaaacacggatcgacctctctcaactgggcggcgactag

SEQ ID NO: 23 - skipped

SEQ ID NO: 24 - DNA, 3249 bp, Artificial Sequence
  Codon optimized N. meningitidis Cas9
atggccgccttcaagcccaaccccatcaactacatcctgggcctggacatcggcatcgccagcgtgggctgggccatggtggagatcgacgaggacgagaaccccatctgcctgatcgacctgggtgtgcgcgtgttcgagcgcgctgaggtgcccaagactggtgacagtctggctatggctcgccggcttgctcgctctgttcggcgccttactcgccggcgcgctcaccgccttctgcgcgctcgccgcctgctgaagcgcgagggtgtgctgcaggctgccgacttcgacgagaacggcctgatcaagagcctgcccaacactccttggcagctgcgcgctgccgctctggaccgcaagctgactcctctggagtggagcgccgtgctgctgcacctgatcaagcaccgcggctacctgagccagcgcaagaacgagggcgagaccgccgacaaggagctgggtgctctgctgaagggcgtggccgacaacgcccacgccctgcagactggtgacttccgcactcctgctgagctggccctgaacaagttcgagaaggagagcggccacatccgcaaccagcgcggcgactacagccacaccttcagccgcaaggacctgcaggccgagctgatcctgctgttcgagaagcagaaggagttcggcaacccccacgtgagcggcggcctgaaggagggcatcgagaccctgctgatgacccagcgccccgccctgagcggcgacgccgtgcagaagatgctgggccactgcaccttcgagccagccgagcccaaggccgccaagaacacctacaccgccgagcgcttcatctggctgaccaagctgaacaacctgcgcatcctggagcagggcagcgagcgccccctgaccgacaccgagcgcgccaccctgatggacgagccctaccgcaagagcaagctgacctacgcccaggcccgcaagctgctgggtctggaggacaccgccttcttcaagggcctgcgctacggcaaggacaacgccgaggccagcaccctgatggagatgaaggcctaccacgccatcagccgcgccctggagaaggagggcctgaaggacaagaagagtcctctgaacctgagccccgagctgcaggacgagatcggcaccgccttcagcctgttcaagaccgacgaggacatcaccggccgcctgaaggaccgcatccagcccgagatcctggaggccctgctgaagcacatcagcttcgacaagttcgtgcagatcagcctgaaggccctgcgccgcatcgtgcccctgatggagcagggcaagcgctacgacgaggcctgcgccgagatctacggcgaccactacggcaagaagaacaccgaggagaagatctacctgcctcctatccccgccgacgagatccgcaaccccgtggtgctgcgcgccctgagccaggcccgcaaggtgatcaacggcgtggtgcgccgctacggcagccccgcccgcatccacatcgagaccgcccgcgaggtgggcaagagcttcaaggaccgcaaggagatcgagaagcgccaggaggagaaccgcaaggaccgcgagaaggccgccgccaagttccgcgagtacttccccaacttcgtgggcgagcccaagagcaaggacatcctgaagctgcgcctgtacgagcagcagcacggcaagtgcctgtacagcggcaaggagatcaacctgggccgcctgaacgagaagggctacgtggagatcgaccacgccctgcccttcagccgcacctgggacgacagcttcaacaacaaggtgctggtgctgggcagcgagaaccagaacaagggcaaccagaccccctacgagtacttcaacggcaaggacaacagccgcgagtggcaggagttcaaggcccgcgtggagaccagccgcttcccccgcagcaagaagcagcgcatcctgctgcagaagttcgacgaggacggcttcaaggagcgcaacctgaacgacacccgctacgtgaaccgcttcctgtgccagttcgtggccgaccgcatgcgcctgaccggcaagggcaagaagcgcgtgttcgccagcaacggccagatcaccaacctgctgcgcggcttctggggcctgcgcaaggtgcgcgccgagaacgaccgccaccacgccctggacgccgtggtggtggcctgcagcaccgtggccatgcagcagaagatcacccgcttcgtgcgctacaaggagatgaacgccttcgacggtaaaaccatcgacaaggagaccggcgaggtgctgcaccagaagacccacttcccccagccctgggagttcttcgcccaggaggtgatgatccgcgtgttcggcaagcccgacggcaagcccgagttcgaggaggccgacacccccgagaagctgcgcaccctgctggccgagaagctgagcagccgccctgaggccgtgcacgagtacgtgactcctctgttcgtgagccgcgcccccaaccgcaagatgagcggtcagggtcacatggagaccgtgaagagcgccaagcgcctggacgagggcgtgagcgtgctgcgcgtgcccctgacccagctgaagctgaaggacctggagaagatggtgaaccgcgagcgcgagcccaagctgtacgaggccctgaaggcccgcctggaggcccacaaggacgaccccgccaaggccttcgccgagcccttctacaagtacgacaaggccggcaaccgcacccagcaggtgaaggccgtgcgcgtggagcaggtgcagaagaccggcgtgtgggtgcgcaaccacaacggcatcgccgacaacgccaccatggtgcgcgtggacgtgttcgagaagggcgacaagtactacctggtgcccatctacagctggcaggtggccaagggcatcctgcccgaccgcgccgtggtgcagggcaaggacgaggaggactggcagctgatcgacgacagcttcaacttcaagttcagcctgcaccccaacgacctggtggaggtgatcaccaagaaggcccgcatgttcggctacttcgccagctgccaccgcggcaccggcaacatcaacatccgcatccacgacctggaccacaagatcggcaagaacggcatcctggagggcatcggcgtgaagaccgccctgagcttccagaagtaccagatcgacgagctgggcaaggagatccgcccctgccgcctgaagaagcgccctcctgtgcgctaa

SEQ ID NO: 25 - protein, 1082 aa, Neisseria meningitidis
MAAFKPNPINYILGLDIGIASVGWAMVEIDEDENPICLIDLGVRVFERAEVPKTGDSLAMARRLARSVRRLTRRRAHRLLRARRLLKREGVLQAADFDENGLIKSLPNTPWQLRAAALDRKLTPLEWSAVLLHLIKHRGYLSQRKNEGETADKELGALLKGVADNAHALQTGDFRTPAELALNKFEKESGHIRNQRGDYSHTFSRKDLQAELILLFEKQKEFGNPHVSGGLKEGIETLLMTQRPALSGDAVQKMLGHCTFEPAEPKAAKNTYTAERFIWLTKLNNLRILEQGSERPLTDTERATLMDEPYRKSKLTYAQARKLLGLEDTAFFKGLRYGKDNAEASTLMEMKAYHAISRALEKEGLKDKKSPLNLSPELQDEIGTAFSLFKTDEDITGRLKDRIQPEILEALLKHISFDKFVQISLKALRRIVPLMEQGKRYDEACAEIYGDHYGKKNTEEKIYLPPIPADEIRNPVVLRALSQARKVINGVVRRYGSPARIHIETAREVGKSFKDRKEIEKRQEENRKDREKAAAKFREYFPNFVGEPKSKDILKLRLYEQQHGKCLYSGKEINLGRLNEKGYVEIDHALPFSRTWDDSFNNKVLVLGSENQNKGNQTPYEYFNGKDNSREWQEFKARVETSRFPRSKKQRILLQKFDEDGFKERNLNDTRYVNRFLCQFVADRMRLTGKGKKRVFASNGQITNLLRGFWGLRKVRAENDRHHALDAVVVACSTVAMQQKITRFVRYKEMNAFDGKTIDKETGEVLHQKTHFPQPWEFFAQEVMIRVFGKPDGKPEFEEADTPEKLRTLLAEKLSSRPEAVHEYVTPLFVSRAPNRKMSGQGHMETVKSAKRLDEGVSVLRVPLTQLKLKDLEKMVNREREPKLYEALKARLEAHKDDPAKAFAEPFYKYDKAGNRTQQVKAVRVEQVQKTGVWVRNHNGIADNATMVRVDVFEKGDKYYLVPIYSWQVAKGILPDRAVVQGKDEEDWQLIDDSFNFKFSLHPNDLVEVITKKARMFGYFASCHRGTGNINIRIHDLDHKIGKNGILEGIGVKTALSFQKYQIDELGKEIRPCRLKKRPPVR

SEQ ID NO: 26 - protein, 1053 aa, Staphylococcus aureus
MKRNYILGLDIGITSVGYGIIDYETRDVIDAGVRLFKEANVENNEGRRSKRGARRLKRRRRHRIQRVKKLLFDYNLLTDHSELSGINPYEARVKGLSQKLSEEEFSAALLHLAKRRGVHNVNEVEEDTGNELSTKEQISRNSKALEEKYVAELQLERLKKDGEVRGSINRFKTSDYVKEAKQLLKVQKAYHQLDQSFIDTYIDLLETRRTYYEGPGEGSPFGWKDIKEWYEMLMGHCTYFPEELRSVKYAYNADLYNALNDLNNLVITRDENEKLEYYEKFQIIENVFKQKKKPTLKQIAKEILVNEEDIKGYRVTSTGKPEFTNLKVYHDIKDITARKEIIENAELLDQIAKILTIYQSSEDIQEELTNLNSELTQEEIEQISNLKGYTGTHNLSLKAINLILDELWHTNDNQIAIFNRLKLVPKKVDLSQQKEIPTTLVDDFILSPVVKRSFIQSIKVINAIIKKYGLPNDIIIELAREKNSKDAQKMINEMQKRNRQTNERIEEIIRTTGKENAKYLIEKIKLHDMQEGKCLYSLEAIPLEDLLNNPFNYEVDHIIPRSVSFDNSFNNKVLVKQEENSKKGNRTPFQYLSSSDSKISYETFKKHILNLAKGKGRISKTKKEYLLEERDINRFSVQKDFINRNLVDTRYATRGLMNLLRSYFRVNNLDVKVKSINGGFTSFLRRKWKFKKERNKGYKHHAEDALIIANADFIFKEWKKLDKAKKVMENQMFEEKQAESMPEIETEQEYKEIFITPHQIKHIKDFKDYKYSHRVDKKPNRELINDTLYSTRKDDKGNTLIVNNLNGLYDKDNDKLKKLINKSPEKLLMYHHDPQTYQKLKLIMEQYGDEKNPLYKYYEETGNYLTKYSKKDNGPVIKKIKYYGNKLNAHLDITDDYPNSRNKVVKLSLKPYRFDVYLDNGVYKFVTVKNLDVIKKENYYEVNSKCYEEAKKLKKISNQAEFIASFYNNDLIKINGELYRVIGVNNDLLNRIEVNMIDITYREYLENMNDKRPPRIIKTIASKTQSIKKYSTDILGNLYEVKSKKHPQIIKKG

SEQ ID NO: 27 - RNA, 104 nt, Artificial Sequence
  gRNA
  misc_feature (1)..(20): Targeting domain, each n is a, c, u, g, unknown, or other
nnnnnnnnnnnnnnnnnnnnguuuuagagcuaugcugaaaagcauagcaaguuaaaauaaggcuaguccguuaucaacuugaaaaaguggcaccgagucggugc

SEQ ID NO: 28 - RNA, 106 nt, Artificial Sequence
  gRNA
  misc_feature (1)..(20): Targeting domain, each n is a, c, u, g, unknown, or other
nnnnnnnnnnnnnnnnnnnnguuuuagagcuaugcuggaaacagcauagcaaguuaaaauaaggcuaguccguuaucaacuugaaaaaguggcaccgagucggugc

SEQ ID NO: 29 - RNA, 116 nt, Artificial Sequence
  gRNA
  misc_feature (1)..(20): Targeting domain, each n is a, c, u, g, unknown, or other
nnnnnnnnnnnnnnnnnnnnguuuuagagcuaugcuguuuuggaaacaaaacagcauagcaaguuaaaauaaggcuaguccguuaucaacuugaaaaaguggcaccgagucggugc

SEQ ID NO: 30 - RNA, 96 nt, Artificial Sequence
  gRNA
  misc_feature (1)..(20): Targeting domain, each n is a, c, u, g, unknown, or other
nnnnnnnnnnnnnnnnnnnnguauuagagcuagaaauagcaaguuaauauaaggcuaguccguuaucaacuugaaaaaguggcaccgagucggugc

SEQ ID NO: 31 - RNA, 96 nt, Artificial Sequence
  gRNA
  misc_feature (1)..(20): Targeting domain, each n is a, c, u, g, unknown, or other
nnnnnnnnnnnnnnnnnnnnguuuaagagcuagaaauagcaaguuuaaauaaggcuaguccguuaucaacuugaaaaaguggcaccgagucggugc

SEQ ID NO: 32 - RNA, 116 nt, Artificial Sequence
  gRNA
  misc_feature (1)..(20): Targeting domain, each n is a, c, u, g, unknown, or other
nnnnnnnnnnnnnnnnnnnnguauuagagcuaugcuguauuggaaacaauacagcauagcaaguuaauauaaggcuaguccguuaucaacuugaaaaaguggcaccgagucggugc

SEQ ID NO: 33 - RNA, 47 nt, Artificial Sequence
  Proximal and tail domains
aaggcuaguccguuaucaacuugaaaaaguggcaccgagucggugcu

SEQ ID NO: 34 - RNA, 49 nt, Artificial Sequence
  Proximal and tail domains
aaggcuaguccguuaucaacuugaaaaaguggcaccgagucgguggugc

SEQ ID NO: 35 - RNA, 51 nt, Artificial Sequence
  Proximal and tail domains
aaggcuaguccguuaucaacuugaaaaaguggcaccgagucggugcggauc

SEQ ID NO: 36 - RNA, 31 nt, Artificial Sequence
  Proximal and tail domains
aaggcuaguccguuaucaacuugaaaaagug

SEQ ID NO: 37 - RNA, 18 nt, Artificial Sequence
  Proximal and tail domains
aaggcuaguccguuauca

SEQ ID NO: 38 - RNA, 12 nt, Artificial Sequence
  Proximal and tail domains
aaggcuaguccg

SEQ ID NO: 39 - DNA, 3159 bp, Artificial Sequence
  Codon optimized S. aureus Cas9
atgaaaaggaactacattctggggctggacatcgggattacaagcgtggggtatgggattattgactatgaaacaagggacgtgatcgacgcaggcgtcagactgttcaaggaggccaacgtggaaaacaatgagggacggagaagcaagaggggagccaggcgcctgaaacgacggagaaggcacagaatccagagggtgaagaaactgctgttcgattacaacctgctgaccgaccattctgagctgagtggaattaatccttatgaagccagggtgaaaggcctgagtcagaagctgtcagaggaagagttttccgcagctctgctgcacctggctaagcgccgaggagtgcataacgtcaatgaggtggaagaggacaccggcaacgagctgtctacaaaggaacagatctcacgcaatagcaaagctctggaagagaagtatgtcgcagagctgcagctggaacggctgaagaaagatggcgaggtgagagggtcaattaataggttcaagacaagcgactacgtcaaagaagccaagcagctgctgaaagtgcagaaggcttaccaccagctggatcagagcttcatcgatacttatatcgacctgctggagactcggagaacctactatgagggaccaggagaagggagccccttcggatggaaagacatcaaggaatggtacgagatgctgatgggacattgcacctattttccagaagagctgagaagcgtcaagtacgcttataacgcagatctgtacaacgccctgaatgacctgaacaacctggtcatcaccagggatgaaaacgagaaactggaatactatgagaagttccagatcatcgaaaacgtgtttaagcagaagaaaaagcctacactgaaacagattgctaaggagatcctggtcaacgaagaggacatcaagggctaccgggtgacaagcactggaaaaccagagttcaccaatctgaaagtgtatcacgatattaaggacatcacagcacggaaagaaatcattgagaacgccgaactgctggatcagattgctaagatcctgactatctaccagagctccgaggacatccaggaagagctgactaacctgaacagcgagctgacccaggaagagatcgaacagattagtaatctgaaggggtacaccggaacacacaacctgtccctgaaagctatcaatctgattctggatgagctgtggcatacaaacgacaatcagattgcaatctttaaccggctgaagctggtcccaaaaaaggtggacctgagtcagcagaaagagatcccaaccacactggtggacgatttcattctgtcacccgtggtcaagcggagcttcatccagagcatcaaagtgatcaacgccatcatcaagaagtacggcctgcccaatgatatcattatcgagctggctagggagaagaacagcaaggacgcacagaagatgatcaatgagatgcagaaacgaaaccggcagaccaatgaacgcattgaagagattatccgaactaccgggaaagagaacgcaaagtacctgattgaaaaaatcaagctgcacgatatgcaggagggaaagtgtctgtattctctggaggccatccccctggaggacctgctgaacaatccattcaactacgaggtcgatcatattatccccagaagcgtgtccttcgacaattcctttaacaacaaggtgctggtcaagcaggaagagaactctaaaaagggcaataggactcctttccagtacctgtctagttcagattccaagatctcttacgaaacctttaaaaagcacattctgaatctggccaaaggaaagggccgcatcagcaagaccaaaaaggagtacctgctggaagagcgggacatcaacagattctccgtccagaaggattttattaaccggaatctggtggacacaagatacgctactcgcggcctgatgaatctgctgcgatcctatttccgggtgaacaatctggatgtgaaagtcaagtccatcaacggcgggttcacatcttttctgaggcgcaaatggaagtttaaaaaggagcgcaacaaagggtacaagcaccatgccgaagatgctctgattatcgcaaatgccgacttcatctttaaggagtggaaaaagctggacaaagccaagaaagtgatggagaaccagatgttcgaagagaagcaggccgaatctatgcccgaaatcgagacagaacaggagtacaaggagattttcatcactcctcaccagatcaagcatatcaaggatttcaaggactacaagtactctcaccgggtggataaaaagcccaacagagagctgatcaatgacaccctgtatagtacaagaaaagacgataaggggaataccctgattgtgaacaatctgaacggactgtacgacaaagataatgacaagctgaaaaagctgatcaacaaaagtcccgagaagctgctgatgtaccaccatgatcctcagacatatcagaaactgaagctgattatggagcagtacggcgacgagaagaacccactgtataagtactatgaagagactgggaactacctgaccaagtatagcaaaaaggataatggccccgtgatcaagaagatcaagtactatgggaacaagctgaatgcccatctggacatcacagacgattaccctaacagtcgcaacaaggtggtcaagctgtcactgaagccatacagattcgatgtctatctggacaacggcgtgtataaatttgtgactgtcaagaatctggatgtcatcaaaaaggagaactactatgaagtgaatagcaagtgctacgaagaggctaaaaagctgaaaaagattagcaaccaggcagagttcatcgcctccttttacaacaacgacctgattaagatcaatggcgaactgtatagggtcatcggggtgaacaatgatctgctgaaccgcattgaagtgaatatgattgacatcacttaccgagagtatctggaaaacatgaatgataagcgcccccctcgaattatcaaaacaattgcctctaagactcagagtatcaaaaagtactcaaccgacattctgggaaacctgtatgaggtgaagagcaaaaagcaccctcagattatcaaaaagggc

SEQ ID NO: 40-41 - skipped (2 entries)

SEQ ID NO: 42 - RNA, 42 nt, Artificial Sequence
  S. pyogenes gRNA, targeting and first complementarity domains
  misc_feature (1)..(20): Targeting domain, each n is a, c, u, g, unknown, or other
  misc_feature (21)..(42): First complementarity domain
nnnnnnnnnnnnnnnnnnnnguuuuagagcuaugcuguuuug

SEQ ID NO: 43 - RNA, 85 nt, Artificial Sequence
  S. pyogenes gRNA, 5' extension, 2nd complementarity, proximal, and tail domains
  misc_feature (1)..(9): 5' extension domain
  misc_feature (10)..(33): Second complementarity domain
  misc_feature (34)..(45): Proximal domain
  misc_feature (46)..(85): Tail domain
ggaaccauucaaaacagcauagcaaguuaaaauaaggcuaguccguuaucaacuugaaaaaguggcaccgagucggugcuuuuuu

SEQ ID NO: 44 - RNA, 62 nt, Artificial Sequence
  S. pyogenes gRNA
  misc_feature (1)..(20): Targeting domain, each n is a, c, u, g, unknown, or other
  misc_feature (21)..(32): First complementarity domain
  misc_feature (33)..(36): Linking domain
  misc_feature (37)..(50): Second complementarity domain
  misc_feature (51)..(62): Proximal domain
nnnnnnnnnnnnnnnnnnnnguuuuagagcuagaaauagcaaguuaaaauaaggcuaguccg

SEQ ID NO: 45 - RNA, 102 nt, Artificial Sequence
  S. pyogenes gRNA
  misc_feature (1)..(20): Targeting domain, each n is a, c, u, g, unknown, or other
  misc_feature (21)..(32): First complementarity domain
  misc_feature (33)..(36): Linking domain
  misc_feature (37)..(50): Second complementarity domain
  misc_feature (51)..(62): Proximal domain
  misc_feature (63)..(102): Tail domain
nnnnnnnnnnnnnnnnnnnnguuuuagagcuagaaauagcaaguuaaaauaaggcuaguccguuaucaacuugaaaaaguggcaccgagucggugcuuuuuu

SEQ ID NO: 46 - RNA, 75 nt, Artificial Sequence
  S. pyogenes gRNA
  misc_feature (1)..(20): Targeting domain, each n is a, c, u, g, unknown, or other
  misc_feature (21)..(36): First complementarity domain
  misc_feature (37)..(40): Linking domain
  misc_feature (41)..(58): Second complementarity domain
  misc_feature (59)..(70): Proximal domain
  misc_feature (71)..(75): Tail domain
nnnnnnnnnnnnnnnnnnnnguuuuagagcuaugcugaaaagcauagcaaguuaaaauaaggcuaguccguuauc

SEQ ID NO: 47 - RNA, 87 nt, Artificial Sequence
  S. pyogenes gRNA
  misc_feature (1)..(20): Targeting domain, each n is a, c, u, g, unknown, or other
  misc_feature (21)..(32): First complementarity domain
  misc_feature (57)..(70): Second complementarity domain
  misc_feature (71)..(82): Proximal domain
  misc_feature (83)..(87): Tail domain
nnnnnnnnnnnnnnnnnnnnguuuuagagcuaugcuguuuuggaaacaaaacagcauagcaaguuaaaauaaggcuaguccguuauc

SEQ ID NO: 48 - RNA, 42 nt, Artificial Sequence
  S. thermophilus gRNA, targeting and first complementarity domains
  misc_feature (1)..(20): Targeting domain, each n is a, c, u, g, unknown, or other
  misc_feature (21)..(42): First complementarity domain
nnnnnnnnnnnnnnnnnnnnguuuuagagcuguguuguuucg

SEQ ID NO: 49 - RNA, 78 nt, Artificial Sequence
  S. thermophilus gRNA, 5' extension, second complementarity, proximal, and tail domains
  misc_feature (1)..(3): 5' extension domain
  misc_feature (4)..(27): Second complementarity domain
  misc_feature (28)..(40): Proximal domain
  misc_feature (41)..(78): Tail domain
gggcgaaacaacacagcgaguuaaaauaaggcuuaguccguacucaacuugaaaagguggcaccgauucgguguuuuu

SEQ ID NO: 50-51 - skipped (2 entries)

SEQ ID NO: 52 - RNA, 85 nt, Streptococcus pyogenes
gaaccauucaaaacagcauagcaaguuaaaauaaggcuaguccguuaucaacuugaaaaaguggcaccgagucggugcuuuuuuu

SEQ ID NO: 53 - skipped

SEQ ID NO: 54 - protein, 12 aa, Artificial Sequence
  N terminal RuvC-like domain
DIGTNSVGWAVT

SEQ ID NO: 55 - skipped

SEQ ID NO: 56 - protein, 12 aa, Artificial Sequence
  N terminal RuvC-like domain
DVGTNSVGWAVT

SEQ ID NO: 57 - skipped

SEQ ID NO: 58 - protein, 12 aa, Artificial Sequence
  N terminal RuvC-like domain
DMGTNSVGWAVT

SEQ ID NO: 59 - protein, 12 aa, Artificial Sequence
  N terminal RuvC-like domain
DVGTSSVGWAVT

SEQ ID NO: 60 - protein, 12 aa, Artificial Sequence
  N terminal RuvC-like domain
DIGTASVGWAVT

SEQ ID NO: 61 - protein, 12 aa, Artificial Sequence
  N terminal RuvC-like domain
DVGTGSVGWAVT

SEQ ID NO: 62 - protein, 12 aa, Artificial Sequence
  N terminal RuvC-like domain
DIGTNSVGWAVV

SEQ ID NO: 63 - protein, 12 aa, Artificial Sequence
  N terminal RuvC-like domain
DIGTNSVGWAVI

SEQ ID NO: 64 - protein, 12 aa, Artificial Sequence
  N terminal RuvC-like domain
DIGTNSVGWAVL

SEQ ID NO: 65 - protein, 12 aa, Artificial Sequence
  N terminal RuvC-like domain
DLGTNSIGWAVV

SEQ ID NO: 66 - protein, 11 aa, Artificial Sequence
  N terminal RuvC-like domain
DLGTNSIGWAI

SEQ ID NO: 67 - protein, 12 aa, Artificial Sequence
  N terminal RuvC like domain
DLGTNSIGWALV

SEQ ID NO: 68 - protein, 12 aa, Artificial Sequence
  N terminal RuvC-like domain
DIGTNSVGWCVT

SEQ ID NO: 69 - protein, 12 aa, Artificial Sequence
  N terminal RuvC-like domain
DIGTNSVGYAVT

SEQ ID NO: 70 - protein, 12 aa, Artificial Sequence
  N terminal RuvC-like domain
DMGTGSLGWAVT

SEQ ID NO: 71 - protein, 12 aa, Artificial Sequence
  N terminal RuvC-like domain
DIGTSSVGWAAI

SEQ ID NO: 72 - protein, 12 aa, Artificial Sequence
  N terminal RuvC-like domain
DLGTGSVGWAVV

SEQ ID NO: 73 - protein, 12 aa, Artificial Sequence
  N terminal RuvC-like domain
DLGVGSVGWAIV

SEQ ID NO: 74 - protein, 12 aa, Artificial Sequence
  N terminal RuvC-like domain
DLGIASIGWAII

SEQ ID NO: 75 - protein, 12 aa, Artificial Sequence
  N terminal RuvC-like domain
DLGIASVGWAIV

SEQ ID NO: 76 - protein, 12 aa, Artificial Sequence
  N terminal RuvC-like domain
DLGVASVGWSIV

SEQ ID NO: 77 - protein, 12 aa, Artificial Sequence
  N terminal RuvC-like domain
DIGIASVGWAIL

SEQ ID NO: 78 - protein, 12 aa, Artificial Sequence
  N terminal RuvC-like domain
DLGISSVGWSVI

SEQ ID NO: 79 - protein, 12 aa, Artificial Sequence
  N terminal RuvC-like domain
DIGIASVGWSVI

SEQ ID NO: 80 - protein, 12 aa, Artificial Sequence
  N terminal RuvC-like domain
DVGIGSIGWAVI

SEQ ID NO: 81 - protein, 12 aa, Artificial Sequence
  N terminal RuvC-like domain
DLGVGSIGFAIV

SEQ ID NO: 82 - protein, 12 aa, Artificial Sequence
  N terminal RuvC-like domain
DIGYASIGWAVI

SEQ ID NO: 83 - protein, 12 aa, Artificial Sequence
  N terminal RuvC-like domain
DTGTNSLGWAIV

SEQ ID NO: 84 - protein, 12 aa, Artificial Sequence
  N terminal RuvC-like domain
DLGTNSIGWCLL

SEQ ID NO: 85 - protein, 12 aa, Artificial Sequence
  N terminal RuvC-like domain
DIGTDSLGWAVF

SEQ ID NO: 86 - protein, 12 aa, Artificial Sequence
  N terminal RuvC-like domain
DIGSNSIGFAVV

SEQ ID NO: 87 - protein, 12 aa, Artificial Sequence
  N terminal RuvC-like domain
DLGVGSIGVAVA

SEQ ID NO: 88 - protein, 12 aa, Artificial Sequence
  N terminal RuvC-like domain
DLGIASCGWGVV

SEQ ID NO: 89 - protein, 12 aa, Artificial Sequence
  N terminal RuvC-like domain
DLGIASVGWCLT

SEQ ID NO: 90 - protein, 12 aa, Artificial Sequence
  N terminal RuvC-like domain
DIGIGSVGVGIL

SEQ ID NO: 91 - protein, 12 aa, Artificial Sequence
  N terminal RuvC-like domain
DIGITSVGYGLI

SEQ ID NO: 92 - protein, 12 aa, Artificial Sequence
  N terminal RuvC-like domain
DIGITSVGFGII

SEQ ID NO: 93 - protein, 12 aa, Artificial Sequence
  N terminal RuvC-like domain
DVGITSTGYAVL

SEQ ID NO: 94 - protein, 12 aa, Artificial Sequence
  N terminal RuvC-like domain
DLGITSFGYAIL

SEQ ID NO: 95 - protein, 12 aa, Artificial Sequence
  N terminal RuvC-like domain
DIGNASVGWSAF

SEQ ID NO: 96 - protein, 12 aa, Artificial Sequence
  N terminal RuvC-like domain
DVGTNSCGWVAM

SEQ ID NO: 97 - protein, 12 aa, Artificial Sequence
  N terminal RuvC-like domain
DVGERSIGLAAV

SEQ ID NO: 98 - protein, 12 aa, Artificial Sequence
  N terminal RuvC-like domain
DVGLNSVGLAAV

SEQ ID NO: 99 - protein, 12 aa, Artificial Sequence
  N terminal RuvC-like domain
DVGLMSVGLAAI

SEQ ID NO: 100 - protein, 12 aa, Artificial Sequence
  N terminal RuvC-like domain
DVGTFSVGLAAI

SEQ ID NO: 101 - protein, 12 aa, Artificial Sequence
  N terminal RuvC-like domain
DIGTGSVGYACM

SEQ ID NO: 102 - protein, 12 aa, Artificial Sequence
  N terminal RuvC-like domain
DLGTTSIGFAHI

SEQ ID NO: 103 - protein, 12 aa, Artificial Sequence
  N terminal RuvC-like domain
DLGTNSIGSSVR

SEQ ID NO: 104-113 - skipped (10 entries)

SEQ ID NO: 114 - protein, 12 aa, Artificial Sequence
  N terminal RuvC-like domain
DIGTNSIGWAVI

SEQ ID NO: 115-126 - skipped (12 entries)

SEQ ID NO: 127 - protein, 12 aa, Artificial Sequence
  N terminal RuvC-like domain
DLGIASVGWAVV

SEQ ID NO: 128-129 - skipped (2 entries)

SEQ ID NO: 130 - protein, 12 aa, Artificial Sequence
  N terminal RuvC-like domain
DIGIASVGWAVL

SEQ ID NO: 131 - protein, 12 aa, Artificial Sequence
  N terminal RuvC-like domain
DIGIASIGWAVI

SEQ ID NO: 132 - protein, 12 aa, Artificial Sequence
  N terminal RuvC-like domain
DIGIASVGWAII

SEQ ID NO: 133 - protein, 12 aa, Artificial Sequence
  N terminal RuvC-like domain
DVGIASVGWAVI

SEQ ID NO: 134 - protein, 11 aa, Artificial Sequence
  N terminal RuvC-like domain
DIGIASVGWAL

SEQ ID NO: 135 - protein, 12 aa, Artificial Sequence
  N terminal RuvC-like domain
DIGIASVGWAMV

SEQ ID NO: 136-137 - skipped (2 entries)

SEQ ID NO: 138 - protein, 12 aa, Artificial Sequence
  N terminal RuvC-like domain
DIGITSVGWAVI

SEQ ID NO: 139 - skipped

SEQ ID NO: 140 - protein, 12 aa, Artificial Sequence
  N terminal RuvC-like domain
DLGISSLGWAIV

SEQ ID NO: 141-143 - skipped (3 entries)

SEQ ID NO: 144 - protein, 12 aa, Artificial Sequence
  N terminal RuvC-like domain
DLGTNSIGWGLL

SEQ ID NO: 145-146 - skipped (2 entries)

SEQ ID NO: 147 - protein, 12 aa, Artificial Sequence
  N terminal RuvC-like domain
DLGSTSLGWAIF

SEQ ID NO: 148 - protein, 12 aa, Artificial Sequence
  N terminal RuvC-like domain
DIGISSIGWAFS

SEQ ID NO: 149-151 - skipped (3 entries)

SEQ ID NO: 152 - protein, 12 aa, Artificial Sequence
  N terminal RuvC-like domain
DIGTTSIGFSVI

SEQ ID NO: 153-159 - skipped (7 entries)

SEQ ID NO: 160 - protein, 12 aa, Artificial Sequence
  N terminal RuvC-like domain
DIGTSSIGWWLY

SEQ ID NO: 161 - protein, 12 aa, Artificial Sequence
  N terminal RuvC-like domain
DLGSNSLGWFVT

SEQ ID NO: 162 - protein, 12 aa, Artificial Sequence
  N terminal RuvC-like domain
DLGANSLGWFVV

SEQ ID NO: 163-170 - skipped (8 entries)

SEQ ID NO: 171 - protein, 15 aa, Artificial Sequence
  N terminal RuvC-like domain
DIGLRIGITSCGWSI

SEQ ID NO: 172 - protein, 12 aa, Artificial Sequence
  N terminal RuvC-like domain
DMGAKYTGVFYA

SEQ ID NO: 173 - protein, 12 aa, Artificial Sequence
  N terminal RuvC-like domain
DLGGKNTGFFSF

SEQ ID NO: 174 - protein, 12 aa, Artificial Sequence
  N terminal RuvC-like domain
DLGVKNTGVFSA

SEQ ID NO: 175 - protein, 12 aa, Artificial Sequence
  N terminal RuvC-like domain
DLGAKFTGVALY

SEQ ID NO: 176 - protein, 12 aa, Artificial Sequence
  N terminal RuvC-like domain
DLGGKFTGVCLS

SEQ ID NO: 177 - protein, 12 aa, Artificial Sequence
  N terminal RuvC-like domain
DLGGTYTGTFIT

SEQ ID NO: 178 - protein, 28 aa, Artificial Sequence
  HNH-like domain
YDIDHIYPRSLTKDDSFDNLVLCERTAN

SEQ ID NO: 179 - protein, 28 aa, Artificial Sequence
  HNH-like domain
DIDHIYPRSKVIKDDSFDNLVLVLKNEN

SEQ ID NO: 180 - protein, 27 aa, Artificial Sequence
  HNH-like domain
DRDHIYPQSKIKDDSIDNLVLVNKTYN

SEQ ID NO: 181 - protein, 27 aa, Artificial Sequence
  HNH-like domain
DIDHIYPRSKIKDDSITNRVLVEKDIN

SEQ ID NO: 182 - protein, 27 aa, Artificial Sequence
  HNH-like domain
DIDHIYPQSKIKDDSISNRVLVCSSCN

SEQ ID NO: 183 - protein, 27 aa, Artificial Sequence
  HNH-like domain
DIDHIYPQSKTMDDSLNNRVLVKKNYN

SEQ ID NO: 184 - protein, 27 aa, Artificial Sequence
  HNH-like domain
DQDHIYPKSKIYDDSLENRVLVKKNLN

SEQ ID NO: 185 - protein, 27 aa, Artificial Sequence
  HNH-like domain
QIDHIVPQSLVKDDSFDNRVLVVPSEN

SEQ ID NO: 186 - protein, 27 aa, Artificial Sequence
  HNH-like domain
DIDHIIPQAFIKDNSIDNRVLTSSKEN

SEQ ID NO: 187 - protein, 27 aa, Artificial Sequence
  HNH-like domain
DIDHIIPQAFLKDNSIDNKVLVSSASN

SEQ ID NO: 188 - protein, 27 aa, Artificial Sequence
  HNH-like domain
DIDHIIPQAYTKDNSLDNRVLVSNITN

SEQ ID NO: 189 - protein, 27 aa, Artificial Sequence
  HNH-like domain
DIDHIVPQSFITDNSIDNLVLTSSAGN

SEQ ID NO: 190 - protein, 27 aa, Artificial Sequence
  HNH-like domain
DVDHIVPQSFLKDDSIDNKVLTRSDKN

SEQ ID NO: 191 - protein, 27 aa, Artificial Sequence
  HNH-like domain
NIDHIYPQSMVKDDSLDNKVLVQSEIN

SEQ ID NO: 192 - protein, 27 aa, Artificial Sequence
  HNH-like domain
DIDHILPQSLIKDDSLDNRVLVNATIN

SEQ ID NO: 193 - protein, 27 aa, Artificial Sequence
  HNH-like domain
DIDHILPQSFIKDDSLENRVLVKKAVN

SEQ ID NO: 194 - protein, 27 aa, Artificial Sequence
  HNH-like domain
EVDHIFPRSFIKDDSIDNKVLVIKKMN

SEQ ID NO: 195 - protein, 27 aa, Artificial Sequence
  HNH-like domain
EVDHIIPRSYIKDDSFENKVLVYREEN

SEQ ID NO: 196 - protein, 27 aa, Artificial Sequence
  HNH-like domain
DIDHIIPQAVTQNDSIDNRVLVARAEN

SEQ ID NO: 197 - protein, 27 aa, Artificial Sequence
  HNH-like domain
EIDHIIPYSISFDDSSSNKLLVLAESN

SEQ ID NO: 198 - protein, 27 aa, Artificial Sequence
  HNH-like domain
EIDHIIPYSLCFDDSSANKVLVHKQSN

SEQ ID NO: 199 - protein, 27 aa, Artificial Sequence
  HNH-like domain
DIDHIIPYSRSMDDSYSNKVLVLSGEN

SEQ ID NO: 200 - protein, 27 aa, Artificial Sequence
  HNH-like domain
DIDHIIPYSKSMDDSFNNKVLCLAEEN

SEQ ID NO: 201 - protein, 27 aa, Artificial Sequence
  HNH-like domain
EIDHIYPYSRSFDDSYMNKVLVFTKQN

SEQ ID NO: 202 - protein, 27 aa, Artificial Sequence
  HNH-like domain
QIDHIYPYSRSMDDSYMNKVLVLTDEN

SEQ ID NO: 203 - protein, 27 aa, Artificial Sequence
  HNH-like domain
EIDHIIPFSRSFDDSLSNKILVLGSEN

SEQ ID NO: 204 - protein, 27 aa, Artificial Sequence
  HNH-like domain
EIDHALPFSRTWDDSFNNKVLVLGSEN

SEQ ID NO: 205 - protein, 27 aa, Artificial Sequence
  HNH-like domain
EIDHALPFSRTWDDSFNNKVLVLASEN

SEQ ID NO: 206 - protein, 27 aa, Artificial Sequence
  HNH-like domain
EIDHIIPISISLDDSINNKVLVLSKAN

SEQ ID NO: 207 - protein, 27 aa, Artificial Sequence
  HNH-like domain
EVDHIIPISISLDDSITNKVLVTHREN

SEQ ID NO: 208 - protein, 27 aa, Artificial Sequence
  HNH-like domain
QVDHALPYSRSYDDSKNNKVLVLTHEN

SEQ ID NO: 209 - protein, 27 aa, Artificial Sequence
  HNH-like domain
EVDHILPLSITFDDSLANKVLVYATAN

SEQ ID NO: 210 - protein, 27 aa, Artificial Sequence
  HNH-like domain
EIDHIIPRSISFDDARSNKVLVYRSEN

SEQ ID NO: 211 - protein, 27 aa, Artificial Sequence
  HNH-like domain
EVDHIIPRSVSFDNSYHNKVLVKQSEN

SEQ ID NO: 212 - protein, 27 aa, Artificial Sequence
  HNH-like domain
DIDHILPYSITFDDSFRNKVLVTSQEN

SEQ ID NO: 213 - protein, 27 aa, Artificial Sequence
  HNH-like domain
EIDHILPRSRSADDSFANKVLCLARAN

SEQ ID NO: 214 - protein, 27 aa, Artificial Sequence
  HNH-like domain
EIEHLLPFSLTLDDSMANKTVCFRQAN

SEQ ID NO: 215 - protein, 27 aa, Artificial Sequence
  HNH-like domain
DIDHILPFSVSLDDSAANKVVCLREAN

SEQ ID NO: 216 - protein, 27 aa, Artificial Sequence
  HNH-like domain
DIDHLIPFSISWDDSAANKVVCMRYAN

SEQ ID NO: 217 - protein, 27 aa, Artificial Sequence
  HNH-like domain
DIDHILPVAMTLDDSPANKIICMRYAN

SEQ ID NO: 218 - protein, 27 aa, Artificial Sequence
  HNH-like domain
DVDHILPYSRTLDDSFPNRTLCLREAN

SEQ ID NO: 219 - protein, 27 aa, Artificial Sequence
  HNH-like domain
EIEHILPFSRTLDDSLNNRTVAMRRAN

SEQ ID NO: 220 - protein, 27 aa, Artificial Sequence
  HNH-like domain
EVDHIIPYSISWDDSYTNKVLTSAKCN

SEQ ID NO: 221 - protein, 27 aa, Artificial Sequence
  HNH-like domain
QVDHILPWSRFGDDSYLNKTLCTARSN

SEQ ID NO: 222 - protein, 27 aa, Artificial Sequence
  HNH-like domain
QVDHILPFSKTLDDSFANKVLAQHDAN

SEQ ID NO: 223 - protein, 27 aa, Artificial Sequence
  HNH-like domain
QIDHAFPLSRSLDDSQSNKVLCLTSSN

SEQ ID NO: 224 - protein, 27 aa, Artificial Sequence
  HNH-like domain
DIDHIVPRSISFDDSFSNLVIVNKLDN

SEQ ID NO: 225 - protein, 27 aa, Artificial Sequence
  HNH-like domain
EIEHIIPYSMSYDNSQANKILTEKAEN

SEQ ID NO: 226 - protein, 27 aa, Artificial Sequence
  HNH-like domain
EIDHVIPYSKSADDSWFNKLLVKKSTN

SEQ ID NO: 227 - protein, 27 aa, Artificial Sequence
  HNH-like domain
EMDHILPYSRSLDNGWHNRVLVHGKDN

SEQ ID NO: 228 - protein, 27 aa, Artificial Sequence
  HNH-like domain
EVDHIVPYSLILDNTINNKALVYAEEN

SEQ ID NO: 229 - protein, 27 aa, Artificial Sequence
  HNH-like domain
EIEHVIPQSLYFDDSFSNKVICEAEVN

SEQ ID NO: 230 - protein, 27 aa, Artificial Sequence
  HNH-like domain
DIEHIIPQARLFDDSFSNKTLEARSVN

SEQ ID NO: 231 - protein, 27 aa, Artificial Sequence
  HNH-like domain
EIEHIVPKARVFDDSFSNKTLTFHRIN

SEQ ID NO: 232 - protein, 28 aa, Artificial Sequence
  HNH-like domain
DKDHIIPQSMKKDDSIINNLVLVNKNAN

SEQ ID NO: 233 - protein, 27 aa, Artificial Sequence
  HNH-like domain
EVEHIWPRSRSFDNSPRNKTLCRKDVN

SEQ ID NO: 234 - protein, 27 aa, Artificial Sequence
  HNH-like domain
IVNHIIPYNRSFDDTYHNRVLTLTETK

SEQ ID NO: 235 - protein, 27 aa, Artificial Sequence
  HNH-like domain
DMEHTIPKSISFDNSDQNLTLCESYYN

SEQ ID NO: 236 - protein, 27 aa, Artificial Sequence
  HNH-like domain
DIEHTIPRSAGGDSTKMNLTLCSSRFN

SEQ ID NO: 237 - protein, 27 aa, Artificial Sequence
  HNH-like domain
DIEHTIPRSISQDNSQMNKTLCSLKFN

SEQ ID NO: 238 - protein, 27 aa, Artificial Sequence
  HNH-like domain
DIDHVIPLARGGRDSLDNMVLCQSDAN

SEQ ID NO: 239 - protein, 27 aa, Artificial Sequence
  HNH-like domain
DIEHLFPIAESEDNGRNNLVISHSACN

SEQ ID NO: 240 - protein, 27 aa, Artificial Sequence
  HNH-like domain
DVDHIFPRDDTADNSYGNKVVAHRQCN

SEQ ID NO: 241 - protein, 27 aa, Artificial Sequence
  HNH-like domain
DIEHIVPQSLGGLSTDYNTIVTLKSVN

SEQ ID NO: 242 - protein, 27 aa, Artificial Sequence
  HNH-like domain
ELDHIVPRTDGGSNRHENLAITCGACN

SEQ ID NO: 243 - protein, 28 aa, Artificial Sequence
  HNH-like domain
EMDHIVPRKGVGSTNTRTNFAAVCAECN

SEQ ID NO: 244 - protein, 28 aa, Artificial Sequence
  HNH-like domain
EMDHIVPRKGVGSTNTRVNLAAACAACN

SEQ ID NO: 245 - protein, 28 aa, Artificial Sequence
  HNH-like domain
EMDHIVPRAGQGSTNTRENLVAVCHRCN

SEQ ID NO: 246 - protein, 33 aa, Artificial Sequence
  HNH-like domain
EIDHILPRSLIKDARGIVFNAEPNLIYASSRGN

SEQ ID NO: 247 - protein, 33 aa, Artificial Sequence
  HNH-like domain
EIDHIIPRSLTGRTKKTVFNSEANLIYCSSKGN

SEQ ID NO: 248 - protein, 33 aa, Artificial Sequence
  HNH-like domain
EIDHIIPRSLTLKKSESIYNSEVNLIFVSAQGN

SEQ ID NO: 249 - protein, 33 aa, Artificial Sequence
  HNH-like domain
EIDHIYPRSLSKKHFGVIFNSEVNLIYCSSQGN

SEQ ID NO: 250 - protein, 33 aa, Artificial Sequence
  HNH-like domain
EIDHILPRSHTLKIYGTVFNPEGNLIYVHQKCN

SEQ ID NO: 251 - protein, 30 aa, Artificial Sequence
  HNH-like domain
ELDHIIPRSHKKYGTLNDEANLICVTRGDN

SEQ ID NO: 252 - protein, 27 aa, Artificial Sequence
  HNH-like domain
ELEHIVPHSFRQSNALSSLVLTWPGVN

SEQ ID NO: 253-302 - skipped (50 entries)

SEQ ID NO: 303 - DNA, 3333 bp, Neisseria meningitidis
atggtgcctaagaagaagagaaaggtggctgccttcaaacctaattcaatcaactacatcctcggcctcgatatcggcatcgcatccgtcggctgggcgatggtagaaattgacgaagaagaaaaccccatccgcctgattgatttgggcgtgcgcgtatttgagcgtgccgaagtaccgaaaacaggcgactcccttgccatggcaaggcgtttggcgcgcagtgttcgccgcctgacccgccgtcgcgcccaccgcctgcttcggacccgccgcctattgaaacgcgaaggcgtattacaagccgccaattttgacgaaaacggcttgattaaatccttaccgaatacaccatggcaacttcgcgcagccgcattagaccgcaaactgacgcctttagagtggtcggcagtcttgttgcatttaatcaaacatcgcggctatttatcgcaacggaaaaacgagggcgaaactgccgataaggagcttggcgctttgcttaaaggcgtagccggcaatgcccatgccttacagacaggcgatttccgcacaccggccgaattggctttaaataaatttgagaaagaaagcggccatatccgcaatcagcgcagcgattattcgcatacgttcagccgcaaagatttacaggcggagctgattttgctgtttgaaaaacaaaaagaatttggcaatccgcatgtttcaggcggccttaaagaaggtattgaaaccctactgatgacgcaacgccctgccctgtccggcgatgccgttcaaaaaatgttggggcattgcaccttcgaaccggcagagccgaaagccgctaaaaacacctacacagccgaacgtttcatctggctgaccaagctgaacaacctgcgtattttagagcaaggcagcgagcggccattgaccgataccgaacgcgccacgcttatggacgagccatacagaaaatccaaactgacttacgcacaagcccgtaagctgctgggtttagaagataccgcctttttcaaaggcttgcgctatggtaaagacaatgccgaagcctcaacattgatggaaatgaaggcctaccatgccatcagccgtgcactggaaaaagaaggattgaaagacaaaaaatccccattaaacctttctcccgaattacaagacgaaatcggcacggcattctccctgttcaaaaccgatgaagacattacaggccgtctgaaagaccgtatacagcccgaaatcttagaagcgctgttgaaacacatcagcttcgataagttcgtccaaatttccttgaaagcattgcgccgaattgtgcctctaatggaacaaggcaaacgttacgatgaagcctgcgccgaaatctacggagaccattacggcaagaagaatacggaagaaaagatttatctgccgccgattcccgccgacgaaatccgcaaccccgtcgtcttgcgcgccttatctcaagcacgtaaggtcattaacggcgtggtacgccgttacggctccccagctcgtatccatattgaaactgcaagggaagtaggtaaatcgtttaaagaccgcaaagaaattgagaaacgccaagaagaaaaccgcaaagaccgggaaaaagccgccgccaaattccgagagtatttccccaattttgtcggagaacccaaatccaaagatattctgaaactgcgcctgtacgagcaacaacacggcaaatgcctgtattcgggcaaagaaatcaacttaggccgtctgaacgaaaaaggctatgtcgaaatcgaccatgccctgccgttctcgcgcacatgggacgacagtttcaacaataaagtactggtattgggcagcgaaaaccaaaacaaaggcaatcaaaccccttacgaatacttcaacggcaaagacaacagccgcgaatggcaggaatttaaagcgcgtgtcgaaaccagccgtttcccgcgcagtaaaaaacaacggattctgctgcaaaaattcgatgaagacggctttaaagaacgcaatctgaacgacacgcgctacgtcaaccgtttcctgtgtcaatttgttgccgaccgtatgcggctgacaggtaaaggcaagaaacgtgtctttgcatccaacggacaaattaccaatctgttgcgcggcttttggggattgcgcaaagtgcgtgcggaaaacgaccgccatcacgccttggacgccgtcgtcgttgcctgctcgaccgttgccatgcagcagaaaattacccgttttgtacgctataaagagatgaacgcgtttgacggtaaaaccatagacaaagaaacaggagaagtgctgcatcaaaaaacacacttcccacaaccttgggaatttttcgcacaagaagtcatgattcgcgtcttcggcaaaccggacggcaaacccgaattcgaagaagccgataccctagaaaaactgcgcacgttgcttgccgaaaaattatcatctcgccccgaagccgtacacgaatacgttacgccactgtttgtttcacgcgcgcccaatcggaagatgagcgggcaagggcatatggagaccgtcaaatccgccaaacgactggacgaaggcgtcagcgtgttgcgcgtaccgctgacacagttaaaactgaaagacttggaaaaaatggtcaatcgggagcgcgaacctaagctatacgaagcactgaaagcacggctggaagcacataaagacgatcctgccaaagcctttgccgagccgttttacaaatacgataaagcaggcaaccgcacccaacaggtaaaagccgtacgcgtagagcaagtacagaaaaccggcgtatgggtgcgcaaccataacggtattgccgacaacgcaaccatggtgcgcgtagatgtgtttgagaaaggcgacaagtattatctggtaccgatttacagttggcaggtagcgaaagggattttgccggatagggctgttgtacaaggaaaagatgaagaagattggcaacttattgatgatagtttcaactttaaattctcattacaccctaatgatttagtcgaggttataacaaaaaaagctagaatgtttggttactttgccagctgccatcgaggcacaggtaatatcaatatacgcattcatgatcttgatcataaaattggcaaaaatggaatactggaaggtatcggcgtcaaaaccgccctttcattccaaaaataccaaattgacgaactgggcaaagaaatcagaccatgccgtctgaaaaaacgcccgcctgtccgttacccatacgatgttccagattacgctgcagctccagcagcgaagaaaaagaagctggattaa

SEQ ID NO: 304-305 - skipped (2 entries)

SEQ ID NO: 306 - protein, 984 aa, Campylobacter jejuni
MARILAFDIGISSIGWAFSENDELKDCGVRIFTKVENPKTGESLALPRRLARSARKRLARRKARLNHLKHLIANEFKLNYEDYQSFDESLAKAYKGSLISPYELRFRALNELLSKQDFARVILHIAKRRGYDDIKNSDDKEKGAILKAIKQNEEKLANYQSVGEYLYKEYFQKFKENSKEFTNVRNKKESYERCIAQSFLKDELKLIFKKQREFGFSFSKKFEEEVLSVAFYKRALKDFSHLVGNCSFFTDEKRAPKNSPLAFMFVALTRIINLLNNLKNTEGILYTKDDLNALLNEVLKNGTLTYKQTKKLLGLSDDYEFKGEKGTYFIEFKKYKEFIKALGEHNLSQDDLNEIAKDITLIKDEIKLKKALAKYDLNQNQIDSLSKLEFKDHLNISFKALKLVTPLMLEGKKYDEACNELNLKVAINEDKKDFLPAFNETYYKDEVTNPVVLRAIKEYRKVLNALLKKYGKVHKINIELAREVGKNHSQRAKIEKEQNENYKAKKDAELECEKLGLKINSKNILKLRLFKEQKEFCAYSGEKIKISDLQDEKMLEIDHIYPYSRSFDDSYMNKVLVFTKQNQEKLNQTPFEAFGNDSAKWQKIEVLAKNLPTKKQKRILDKNYKDKEQKNFKDRNLNDTRYIARLVLNYTKDYLDFLPLSDDENTKLNDTQKGSKVHVEAKSGMLTSALRHTWGFSAKDRNNHLHHAIDAVIIAYANNSIVKAFSDFKKEQESNSAELYAKKISELDYKNKRKFFEPFSGFRQKVLDKIDEIFVSKPERKKPSGALHEETFRKEEEFYQSYGGKEGVLKALELGKIRKVNGKIVKNGDMFRVDIFKHKKTNKFYAVPIYTMDFALKVLPNKAVARSKKGEIKDWILMDENYEFCFSLYKDSLILIQTKDMQEPEFVYYNAFTSSTVSLIVSKHDNKFETLSKNQKILFKNANEKEVIAKSIGIQNLKVFEKYIVSALGEVTKAEFRQREDFKK

SEQ ID NO: 307 - protein, 1436 aa, Bacteroides fragilis
MKRILGLDLGTNSIGWALVNEAENKDERSSIVKLGVRVNPLTVDELTNFEKGKSITTNADRTLKRGMRRNLQRYKLRRETLTEVLKEHKLITEDTILSENGNRTTFETYRLRAKAVTEEISLEEFARVLLMINKKRGYKSSRKAKGVEEGTLIDGMDIARELYNNNLTPGELCLQLLDAGKKFLPDFYRSDLQNELDRIWEKQKEYYPEILTDVLKEELRGKKRDAVWAICAKYFVWKENYTEWNKEKGKTEQQEREHKLEGIYSKRKRDEAKRENLQWRVNGLKEKLSLEQLVIVFQEMNTQINNSSGYLGAISDRSKELYFNKQTVGQYQMEMLDKNPNASLRNMVFYRQDYLDEFNMLWEKQAVYHKELTEELKKEIRDIIIFYQRRLKSQKGLIGFCEFESRQIEVDIDGKKKIKTVGNRVISRSSPLFQEFKIWQILNNIEVTVVGKKRKRRKLKENYSALFEELNDAEQLELNGSRRLCQEEKELLAQELFIRDKMTKSEVLKLLFDNPQELDLNFKTIDGNKTGYALFQAYSKMIEMSGHEPVDFKKPVEKVVEYIKAVFDLLNWNTDILGFNSNEELDNQPYYKLWHLLYSFEGDNTPTGNGRLIQKMTELYGFEKEYATILANVSFQDDYGSLSAKAIHKILPHLKEGNRYDVACVYAGYRHSESSLTREEIANKVLKDRLMLLPKNSLHNPVVEKILNQMVNVINVIIDIYGKPDEIRVELARELKKNAKEREELTKSIAQTTKAHEEYKTLLQTEFGLTNVSRTDILRYKLYKELESCGYKTLYSNTYISREKLFSKEFDIEHIIPQARLFDDSFSNKTLEARSVNIEKGNKTAYDFVKEKFGESGADNSLEHYLNNIEDLFKSGKISKTKYNKLKMAEQDIPDGFIERDLRNTQYIAKKALSMLNEISHRVVATSGSVTDKLREDWQLIDVMKELNWEKYKALGLVEYFEDRDGRQIGRIKDWTKRNDHRHHAMDALTVAFTKDVFIQYFNNKNASLDPNANEHAIKNKYFQNGRAIAPMPLREFRAEAKKHLENTLISIKAKNKVITGNINKTRKKGGVNKNMQQTPRGQLHLETIYGSGKQYLTKEEKVNASFDMRKIGTVSKSAYRDALLKRLYENDNDPKKAFAGKNSLDKQPIWLDKEQMRKVPEKVKIVTLEAIYTIRKEISPDLKVDKVIDVGVRKILIDRLNEYGNDAKKAFSNLDKNPIWLNKEKGISIKRVTISGISNAQSLHVKKDKDGKPILDENGRNIPVDFVNTGNNHHVAVYYRPVIDKRGQLVVDEAGNPKYELEEVVVSFFEAVTRANLGLPIIDKDYKTTEGWQFLFSMKQNEYFVFPNEKTGFNPKEIDLLDVENYGLISPNLFRVQKFSLKNYVFRHHLETTIKDTSSILRGITWIDFRSSKGLDTIVKVRVNHIGQIVSVGEY

SEQ ID NO: 308 - protein, 1420 aa, Bifidobacterium bifidum
MSRKNYVDDYAISLDIGNASVGWSAFTPNYRLVRAKGHELIGVRLFDPADTAESRRMARTTRRRYSRRRWRLRLLDALFDQALSEIDPSFLARRKYSWVHPDDENNADCWYGSVLFDSNEQDKRFYEKYPTIYHLRKALMEDDSQHDIREIYLAIHHMVKYRGNFLVEGTLESSNAFKEDELLKLLGRITRYEMSEGEQNSDIEQDDENKLVAPANGQLADALCATRGSRSMRVDNALEALSAVNDLSREQRAIVKAIFAGLEGNKLDLAKIFVSKEFSSENKKILGIYFNKSDYEEKCVQIVDSGLLDDEEREFLDRMQGQYNAIALKQLLGRSTSVSDSKCASYDAHRANWNLIKLQLRTKENEKDINENYGILVGWKIDSGQRKSVRGESAYENMRKKANVFFKKMIETSDLSETDKNRLIHDIEEDKLFPIQRDSDNGVIPHQLHQNELKQIIKKQGKYYPFLLDAFEKDGKQINKIEGLLTFRVPYFVGPLVVPEDLQKSDNSENHWMVRKKKGEITPWNFDEMVDKDASGRKFIERLVGTDSYLLGEPTLPKNSLLYQEYEVLNELNNVRLSVRTGNHWNDKRRMRLGREEKTLLCQRLFMKGQTVTKRTAENLLRKEYGRTYELSGLSDESKFTSSLSTYGKMCRIFGEKYVNEHRDLMEKIVELQTVFEDKETLLHQLRQLEGISEADCALLVNTHYTGWGRLSRKLLTTKAGECKISDDFAPRKHSIIEIMRAEDRNLMEIITDKQLGFSDWIEQENLGAENGSSLMEVVDDLRVSPKVKRGIIQSIRLIDDISKAVGKRPSRIFLELADDIQPSGRTISRKSRLQDLYRNANLGKEFKGIADELNACSDKDLQDDRLFLYYTQLGKDMYTGEELDLDRLSSAYDIDHIIPQAVTQNDSIDNRVLVARAENARKTDSFTYMPQIADRMRNFWQILLDNGLISRVKFERLTRQNEFSEREKERFVQRSLVETRQIMKNVATLMRQRYGNSAAVIGLNAELTKEMHRYLGFSHKNRDINDYHHAQDALCVGIAGQFAANRGFFADGEVSDGAQNSYNQYLRDYLRGYREKLSAEDRKQGRAFGFIVGSMRSQDEQKRVNPRTGEVVWSEEDKDYLRKVMNYRKMLVTQKVGDDFGALYDETRYAATDPKGIKGIPFDGAKQDTSLYGGFSSAKPAYAVLIESKGKTRLVNVTMQEYSLLGDRPSDDELRKVLAKKKSEYAKANILLRHVPKMQLIRYGGGLMVIKSAGELNNAQQLWLPYEEYCYFDDLSQGKGSLEKDDLKKLLDSILGSVQCLYPWHRFTEEELADLHVAFDKLPEDEKKNVITGIVSALHADAKTANLSIVGMTGSWRRMNNKSGYTFSDEDEFIFQSPSGLFEKRVTVGELKRKAKKEVNSKYRTNEKRLPTLSGASQP

SEQ ID NO: 309 - protein, 1397 aa, Veillonella atypica
METQTSNQLITSHLKDYPKQDYFVGLDIGTNSVGWAVTNTSYELLKFHSHKMWGSRLFEEGESAVTRRGFRSMRRRLERRKLRLKLLEELFADAMAQVDSTFFIRLHESKYHYEDKTTGHSSKHILFIDEDYTDQDYFTEYPTIYHLRKDLMENGTDDIRKLFLAVHHILKYRGNFLYEGATFNSNAFTFEDVLKQALVNITFNCFDTNSAISSISNILMESGKTKSDKAKAIERLVDTYTVFDEVNTPDKPQKEQVKEDKKTLKAFANLVLGLSANLIDLFGSVEDIDDDLKKLQIVGDTYDEKRDELAKVWGDEIHIIDDCKSVYDAIILMSIKEPGLTISQSKVKAFDKHKEDLVILKSLLKLDRNVYNEMFKSDKKGLHNYVHYIKQGRTEETSCSREDFYKYTKKIVEGLADSKDKEYILNEIELQTLLPLQRIKDNGVIPYQLHLEELKVILDKCGPKFPFLHTVSDGFSVTEKLIKMLEFRIPYYVGPLNTHHNIDNGGFSWAVRKQAGRVTPWNFEEKIDREKSAAAFIKNLTNKCTYLFGEDVLPKSSLLYSEFMLLNELNNVRIDGKALAQGVKQHLIDSIFKQDHKKMTKNRIELFLKDNNYITKKHKPEITGLDGEIKNDLTSYRDMVRILGNNFDVSMAEDIITDITIFGESKKMLRQTLRNKFGSQLNDETIKKLSKLRYRDWGRLSKKLLKGIDGCDKAGNGAPKTIIELMRNDSYNLMEILGDKFSFMECIEEENAKLAQGQVVNPHDIIDELALSPAVKRAVWQALRIVDEVAHIKKALPSRIFVEVARTNKSEKKKKDSRQKRLSDLYSAIKKDDVLQSGLQDKEFGALKSGLANYDDAALRSKKLYLYYTQMGRCAYTGNIIDLNQLNTDNYDIDHIYPRSLTKDDSFDNLVLCERTANAKKSDIYPIDNRIQTKQKPFWAFLKHQGLISERKYERLTRIAPLTADDLSGFIARQLVETNQSVKATTTLLRRLYPDIDVVFVKAENVSDFRHNNNFIKVRSLNHHHHAKDAYLNIVVGNVYHEKFTRNFRLFFKKNGANRTYNLAKMFNYDVICTNAQDGKAWDVKTSMNTVKKMMASNDVRVTRRLLEQSGALADATIYKASVAAKAKDGAYIGMKTKYSVFADVTKYGGMTKIKNAYSIIVQYTGKKGEEIKEIVPLPIYLINRNATDIELIDYVKSVIPKAKDISIKYRKLCINQLVKVNGFYYYLGGKTNDKIYIDNAIELVVPHDIATYIKLLDKYDLLRKENKTLKASSITTSIYNINTSTVVSLNKVGIDVFDYFMSKLRTPLYMKMKGNKVDELSSTGRSKFIKMTLEEQSIYLLEVLNLLTNSKTTFDVKPLGITGSRSTIGVKIHNLDEFKIINESITGLYSNEVTIV

SEQ ID NO: 310 - protein, 1363 aa, Lactobacillus rhamnosus
MTKLNQPYGIGLDIGSNSIGFAVVDANSHLLRLKGETAIGARLFREGQSAADRRGSRTTRRRLSRTRWRLSFLRDFFAPHITKIDPDFFLRQKYSEISPKDKDRFKYEKRLFNDRTDAEFYEDYPSMYHLRLHLMTHTHKADPREIFLAIHHILKSRGHFLTPGAAKDFNTDKVDLEDIFPALTEAYAQVYPDLELTFDLAKADDFKAKLLDEQATPSDTQKALVNLLLSSDGEKEIVKKRKQVLTEFAKAITGLKTKFNLALGTEVDEADASNWQFSMGQLDDKWSNIETSMTDQGTEIFEQIQELYRARLLNGIVPAGMSLSQAKVADYGQHKEDLELFKTYLKKLNDHELAKTIRGLYDRYINGDDAKPFLREDFVKALTKEVTAHPNEVSEQLLNRMGQANFMLKQRTKANGAIPIQLQQRELDQIIANQSKYYDWLAAPNPVEAHRWKMPYQLDELLNFHIPYYVGPLITPKQQAESGENVFAWMVRKDPSGNITPYNFDEKVDREASANTFIQRMKTTDTYLIGEDVLPKQSLLYQKYEVLNELNNVRINNECLGTDQKQRLIREVFERHSSVTIKQVADNLVAHGDFARRPEIRGLADEKRFLSSLSTYHQLKEILHEAIDDPTKLLDIENIITWSTVFEDHTIFETKLAEIEWLDPKKINELSGIRYRGWGQFSRKLLDGLKLGNGHTVIQELMLSNHNLMQILADETLKETMTELNQDKLKTDDIEDVINDAYTSPSNKKALRQVLRVVEDIKHAANGQDPSWLFIETADGTGTAGKRTQSRQKQIQTVYANAAQELIDSAVRGELEDKIADKASFTDRLVLYFMQGGRDIYTGAPLNIDQLSHYDIDHILPQSLIKDDSLDNRVLVNATINREKNNVFASTLFAGKMKATWRKWHEAGLISGRKLRNLMLRPDEIDKFAKGFVARQLVETRQIIKLTEQIAAAQYPNTKIIAVKAGLSHQLREELDFPKNRDVNHYHHAFDAFLAARIGTYLLKRYPKLAPFFTYGEFAKVDVKKFREFNFIGALTHAKKNIIAKDTGEIVWDKERDIRELDRIYNFKRMLITHEVYFETADLFKQTIYAAKDSKERGGSKQLIPKKQGYPTQVYGGYTQESGSYNALVRVAEADTTAYQVIKISAQNASKIASANLKSREKGKQLLNEIVVKQLAKRRKNWKPSANSFKIVIPRFGMGTLFQNAKYGLFMVNSDTYYRNYQELWLSRENQKLLKKLFSIKYEKTQMNHDALQVYKAIIDQVEKFFKLYDINQFRAKLSDAIERFEKLPINTDGNKIGKTETLRQILIGLQANGTRSNVKNLGIKTDLGLLQVGSGIKLDKDTQIVYQSPSGLFKRRIPLADL

SEQ ID NO: 311 - protein, 1365 aa, Filifactor alocis
MTKEYYLGLDVGTNSVGWAVTDSQYNLCKFKKKDMWGIRLFESANTAKDRRLQRGNRRRLERKKQRIDLLQEIFSPEICKIDPTFFIRLNESRLHLEDKSNDFKYPLFIEKDYSDIEYYKEFPTIFHLRKHLIESEEKQDIRLIYLALHNIIKTRGHFLIDGDLQSAKQLRPILDTFLLSLQEEQNLSVSLSENQKDEYEEILKNRSIAKSEKVKKLKNLFEISDELEKEEKKAQSAVIENFCKFIVGNKGDVCKFLRVSKEELEIDSFSFSEGKYEDDIVKNLEEKVPEKVYLFEQMKAMYDWNILVDILETEEYISFAKVKQYEKHKTNLRLLRDIILKYCTKDEYNRMFNDEKEAGSYTAYVGKLKKNNKKYWIEKKRNPEEFYKSLGKLLDKIEPLKEDLEVLTMMIEECKNHTLLPIQKNKDNGVIPHQVHEVELKKILENAKKYYSFLTETDKDGYSVVQKIESIFRFRIPYYVGPLSTRHQEKGSNVWMVRKPGREDRIYPWNMEEIIDFEKSNENFITRMTNKCTYLIGEDVLPKHSLLYSKYMVLNELNNVKVRGKKLPTSLKQKVFEDLFENKSKVTGKNLLEYLQIQDKDIQIDDLSGFDKDFKTSLKSYLDFKKQIFGEEIEKESIQNMIEDIIKWITIYGNDKEMLKRVIRANYSNQLTEEQMKKITGFQYSGWGNFSKMFLKGISGSDVSTGETFDIITAMWETDNNLMQILSKKFTFMDNVEDFNSGKVGKIDKITYDSTVKEMFLSPENKRAVWQTIQVAEEIKKVMGCEPKKIFIEMARGGEKVKKRTKSRKAQLLELYAACEEDCRELIKEIEDRDERDFNSMKLFLYYTQFGKCMYSGDDIDINELIRGNSKWDRDHIYPQSKIKDDSIDNLVLVNKTYNAKKSNELLSEDIQKKMHSFWLSLLNKKLITKSKYDRLTRKGDFTDEELSGFIARQLVETRQSTKAIADIFKQIYSSEVVYVKSSLVSDFRKKPLNYLKSRRVNDYHHAKDAYLNIVVGNVYNKKFTSNPIQWMKKNRDTNYSLNKVFEHDVVINGEVIWEKCTYHEDTNTYDGGTLDRIRKIVERDNILYTEYAYCEKGELFNATIQNKNGNSTVSLKKGLDVKKYGGYFSANTSYFSLIEFEDKKGDRARHIIGVPIYIANMLEHSPSAFLEYCEQKGYQNVRILVEKIKKNSLLIINGYPLRIRGENEVDTSFKRAIQLKLDQKNYELVRNIEKFLEKYVEKKGNYPIDENRDHITHEKMNQLYEVLLSKMKKFNKKGMADPSDRIEKSKPKFIKLEDLIDKINVINKMLNLLRCDNDTKADLSLIELPKNAGSFVVKKNTIGKSKIILVNQSVTGLYENRREL

SEQ ID NO: 312 - protein, 1389 aa, Oenococcus kitaharae
MARDYSVGLDIGTSSVGWAAIDNKYHLIRAKSKNLIGVRLFDSAVTAEKRRGYRTTRRRLSRRHWRLRLLNDIFAGPLTDFGDENFLARLKYSWVHPQDQSNQAHFAAGLLFDSKEQDKDFYRKYPTIYHLRLALMNDDQKHDLREVYLAIHHLVKYRGHFLIEGDVKADSAFDVHTFADAIQRYAESNNSDENLLGKIDEKKLSAALTDKHGSKSQRAETAETAFDILDLQSKKQIQAILKSVVGNQANLMAIFGLDSSAISKDEQKNYKFSFDDADIDEKIADSEALLSDTEFEFLCDLKAAFDGLTLKMLLGDDKTVSAAMVRRFNEHQKDWEYIKSHIRNAKNAGNGLYEKSKKFDGINAAYLALQSDNEDDRKKAKKIFQDEISSADIPDDVKADFLKKIDDDQFLPIQRTKNNGTIPHQLHRNELEQIIEKQGIYYPFLKDTYQENSHELNKITALINFRVPYYVGPLVEEEQKIADDGKNIPDPTNHWMVRKSNDTITPWNLSQVVDLDKSGRRFIERLTGTDTYLIGEPTLPKNSLLYQKFDVLQELNNIRVSGRRLDIRAKQDAFEHLFKVQKTVSATNLKDFLVQAGYISEDTQIEGLADVNGKNFNNALTTYNYLVSVLGREFVENPSNEELLEEITELQTVFEDKKVLRRQLDQLDGLSDHNREKLSRKHYTGWGRISKKLLTTKIVQNADKIDNQTFDVPRMNQSIIDTLYNTKMNLMEIINNAEDDFGVRAWIDKQNTTDGDEQDVYSLIDELAGPKEIKRGIVQSFRILDDITKAVGYAPKRVYLEFARKTQESHLTNSRKNQLSTLLKNAGLSELVTQVSQYDAAALQNDRLYLYFLQQGKDMYSGEKLNLDNLSNYDIDHIIPQAYTKDNSLDNRVLVSNITNRRKSDSSNYLPALIDKMRPFWSVLSKQGLLSKHKFANLTRTRDFDDMEKERFIARSLVETRQIIKNVASLIDSHFGGETKAVAIRSSLTADMRRYVDIPKNRDINDYHHAFDALLFSTVGQYTENSGLMKKGQLSDSAGNQYNRYIKEWIHAARLNAQSQRVNPFGFVVGSMRNAAPGKLNPETGEITPEENADWSIADLDYLHKVMNFRKITVTRRLKDQKGQLYDESRYPSVLHDAKSKASINFDKHKPVDLYGGFSSAKPAYAALIKFKNKFRLVNVLRQWTYSDKNSEDYILEQIRGKYPKAEMVLSHIPYGQLVKKDGALVTISSATELHNFEQLWLPLADYKLINTLLKTKEDNLVDILHNRLDLPEMTIESAFYKAFDSILSFAFNRYALHQNALVKLQAHRDDFNALNYEDKQQTLERILDALHASPASSDLKKINLSSGFGRLFSPSHFTLADTDEFIFQSVTGLFSTQKTVAQLYQETK

SEQ ID NO: 313 - protein, 1323 aa, Fructobacillus fructosus
MVYDVGLDIGTGSVGWVALDENGKLARAKGKNLVGVRLFDTAQTAADRRGFRTTRRRLSRRKWRLRLLDELFSAEINEIDSSFFQRLKYSYVHPKDEENKAHYYGGYLFPTEEETKKFHRSYPTIYHLRQELMAQPNKRFDIREIYLAIHHLVKYRGHFLSSQEKITIGSTYNPEDLANAIEVYADEKGLSWELNNPEQLTEIISGEAGYGLNKSMKADEALKLFEFDNNQDKVAIKTLLAGLTGNQIDFAKLFGKDISDKDEAKLWKLKLDDEALEEKSQTILSQLTDEEIELFHAVVQAYDGFVLIGLLNGADSVSAAMVQLYDQHREDRKLLKSLAQKAGLKHKRFSEIYEQLALATDEATIKNGISTARELVEESNLSKEVKEDTLRRLDENEFLPKQRTKANSVIPHQLHLAELQKILQNQGQYYPFLLDTFEKEDGQDNKIEELLRFRIPYYVGPLVTKKDVEHAGGDADNHWVERNEGFEKSRVTPWNFDKVFNRDKAARDFIERLTGNDTYLIGEKTLPQNSLRYQLFTVLNELNNVRVNGKKFDSKTKADLINDLFKARKTVSLSALKDYLKAQGKGDVTITGLADESKFNSSLSSYNDLKKTFDAEYLENEDNQETLEKIIEIQTVFEDSKIASRELSKLPLDDDQVKKLSQTHYTGWGRLSEKLLDSKIIDERGQKVSILDKLKSTSQNFMSIINNDKYGVQAWITEQNTGSSKLTFDEKVNELTTSPANKRGIKQSFAVLNDIKKAMKEEPRRVYLEFAREDQTSVRSVPRYNQLKEKYQSKSLSEEAKVLKKTLDGNKNKMSDDRYFLYFQQQGKDMYTGRPINFERLSQDYDIDHIIPQAFTKDDSLDNRVLVSRPENARKSDSFAYTDEVQKQDGSLWTSLLKSGFINRKKYERLTKAGKYLDGQKTGFIARQLVETRQIIKNVASLIEGEYENSKAVAIRSEITADMRLLVGIKKHREINSFHHAFDALLITAAGQYMQNRYPDRDSTNVYNEFDRYTNDYLKNLRQLSSRDEVRRLKSFGFVVGTMRKGNEDWSEENTSYLRKVMMFKNILTTKKTEKDRGPLNKETIFSPKSGKKLIPLNSKRSDTALYGGYSNVYSAYMTLVRANGKNLLIKIPISIANQIEVGNLKINDYIVNNPAIKKFEKILISKLPLGQLVNEDGNLIYLASNEYRHNAKQLWLSTTDADKIASISENSSDEELLEAYDILTSENVKNRFPFFKKDIDKLSQVRDEFLDSDKRIAVIQTILRGLQIDAAYQAPVKIISKKVSDWHKLQQSGGIKLSDNSEMIYQSATGIFETRVKISDLL

SEQ ID NO: 314 - protein, 1329 aa, Catenibacterium mitsuokai
IVDYCIGLDLGTGSVGWAVVDMNHRLMKRNGKHLWGSRLFSNAETAANRRASRSIRRRYNKRRERIRLLRAILQDMVLEKDPTFFIRLEHTSFLDEEDKAKYLGTDYKDNYNLFIDEDFNDYTYYHKYPTIYHLRKALCESTEKADPRLIYLALHHIVKYRGNFLYEGQKFNMDASNIEDKLSDIFTQFTSFNNIPYEDDEKKNLEILEILKKPLSKKAKVDEVMTLIAPEKDYKSAFKELVTGIAGNKMNVTKMILCEPIKQGDSEIKLKFSDSNYDDQFSEVEKDLGEYVEFVDALHNVYSWVELQTIMGATHTDNASISEAMVSRYNKHHDDLKLLKDCIKNNVPNKYFDMFRNDSEKSKGYYNYINRPSKAPVDEFYKYVKKCIEKVDTPEAKQILNDIELENFLLKQNSRTNGSVPYQMQLDEMIKIIDNQAEYYPILKEKREQLLSILTFRIPYYFGPLNETSEHAWIKRLEGKENQRILPWNYQDIVDVDATAEGFIKRMRSYCTYFPDEEVLPKNSLIVSKYEVYNELNKIRVDDKLLEVDVKNDIYNELFMKNKTVTEKKLKNWLVNNQCCSKDAEIKGFQKENQFSTSLTPWIDFTNIFGKIDQSNFDLIENIIYDLTVFEDKKIMKRRLKKKYALPDDKVKQILKLKYKDWSRLSKKLLDGIVADNRFGSSVTVLDVLEMSRLNLMEIINDKDLGYAQMIEEATSCPEDGKFTYEEVERLAGSPALKRGIWQSLQIVEEITKVMKCRPKYIYIEFERSEEAKERTESKIKKLENVYKDLDEQTKKEYKSVLEELKGFDNTKKISSDSLFLYFTQLGKCMYSGKKLDIDSLDKYQIDHIVPQSLVKDDSFDNRVLVVPSENQRKLDDLVVPFDIRDKMYRFWKLLFDHELISPKKFYSLIKTEYTERDEERFINRQLVETRQITKNVTQIIEDHYSTTKVAAIRANLSHEFRVKNHIYKNRDINDYHHAHDAYIVALIGGFMRDRYPNMHDSKAVYSEYMKMFRKNKNDQKRWKDGFVINSMNYPYEVDGKLIWNPDLINEIKKCFYYKDCYCTTKLDQKSGQLFNLTVLSNDAHADKGVTKAVVPVNKNRSDVHKYGGFSGLQYTIVAIEGQKKKGKKTELVKKISGVPLHLKAASINEKINYIEEKEGLSDVRIIKDNIPVNQMIEMDGGEYLLTSPTEYVNARQLVLNEKQCALIADIYNAIYKQDYDNLDDILMIQLYIELTNKMKVLYPAYRGIAEKFESMNENYVVISKEEKANIIKQMLIVMHRGPQNGNIVYDDFKISDRIGRLKTKNHNLNNIVFISQSPTGIYTKKYKL

SEQ ID NO: 315 - protein, 1348 aa, Finegoldia magna
MKSEKKYYIGLDVGTNSVGWAVTDEFYNILRAKGKDLWGVRLFEKADTAANTRIFRSGRRRNDRKGMRLQILREIFEDEIKKVDKDFYDRLDESKFWAEDKKVSGKYSLFNDKNFSDKQYFEKFPTIFHLRKYLMEEHGKVDIRYYFLAINQMMKRRGHFLIDGQISHVTDDKPLKEQLILLINDLLKIELEEELMDSIFEILADVNEKRTDKKNNLKELIKGQDFNKQEGNILNSIFESIVTGKAKIKNIISDEDILEKIKEDNKEDFVLTGDSYEENLQYFEEVLQENITLFNTLKSTYDFLILQSILKGKSTLSDAQVERYDEHKKDLEILKKVIKKYDEDGKLFKQVFKEDNGNGYVSYIGYYLNKNKKITAKKKISNIEFTKYVKGILEKQCDCEDEDVKYLLGKIEQENFLLKQISSINSVIPHQIHLFELDKILENLAKNYPSFNNKKEEFTKIEKIRKTFTFRIPYYVGPLNDYHKNNGGNAWIFRNKGEKIRPWNFEKIVDLHKSEEEFIKRMLNQCTYLPEETVLPKSSILYSEYMVLNELNNLRINGKPLDTDVKLKLIEELFKKKTKVTLKSIRDYMVRNNFADKEDFDNSEKNLEIASNMKSYIDFNNILEDKFDVEMVEDLIEKITIHTGNKKLLKKYIEETYPDLSSSQIQKIINLKYKDWGRLSRKLLDGIKGTKKETEKTDTVINFLRNSSDNLMQIIGSQNYSFNEYIDKLRKKYIPQEISYEVVENLYVSPSVKKMIWQVIRVTEEITKVMGYDPDKIFIEMAKSEEEKKTTISRKNKLLDLYKAIKKDERDSQYEKLLTGLNKLDDSDLRSRKLYLYYTQMGRDMYTGEKIDLDKLFDSTHYDKDHIIPQSMKKDDSIINNLVLVNKNANQTTKGNIYPVPSSIRNNPKIYNYWKYLMEKEFISKEKYNRLIRNTPLTNEELGGFINRQLVETRQSTKAIKELFEKFYQKSKIIPVKASLASDLRKDMNTLKSREVNDLHHAHDAFLNIVAGDVWNREFTSNPINYVKENREGDKVKYSLSKDFTRPRKSKGKVIWTPEKGRKLIVDTLNKPSVLISNESHVKKGELFNATIAGKKDYKKGKIYLPLKKDDRLQDVSKYGGYKAINGAFFFLVEHTKSKKRIRSIELFPLHLLSKFYEDKNTVLDYAINVLQLQDPKIIIDKINYRTEIIIDNFSYLISTKSNDGSITVKPNEQMYWRVDEISNLKKIENKYKKDAILTEEDRKIMESYIDKIYQQFKAGKYKNRRTTDTIIEKYEIIDLDTLDNKQLYQLLVAFISLSYKTSNNAVDFTVIGLGTECGKPRITNLPDNTYLVYKSITGIYEKRIRIK

SEQ ID NO: 316 - protein, 1384 aa, Coriobacterium glomerans
MKLRGIEDDYSIGLDMGTSSVGWAVTDERGTLAHFKRKPTWGSRLFREAQTAAVARMPRGQRRRYVRRRWRLDLLQKLFEQQMEQADPDFFIRLRQSRLLRDDRAEEHADYRWPLFNDCKFTERDYYQRFPTIYHVRSWLMETDEQADIRLIYLALHNIVKHRGNFLREGQSLSAKSARPDEALNHLRETLRVWSSERGFECSIADNGSILAMLTHPDLSPSDRRKKIAPLFDVKSDDAAADKKLGIALAGAVIGLKTEFKNIFGDFPCEDSSIYLSNDEAVDAVRSACPDDCAELFDRLCEVYSAYVLQGLLSYAPGQTISANMVEKYRRYGEDLALLKKLVKIYAPDQYRMFFSGATYPGTGIYDAAQARGYTKYNLGPKKSEYKPSESMQYDDFRKAVEKLFAKTDARADERYRMMMDRFDKQQFLRRLKTSDNGSIYHQLHLEELKAIVENQGRFYPFLKRDADKLVSLVSFRIPYYVGPLSTRNARTDQHGENRFAWSERKPGMQDEPIFPWNWESIIDRSKSAEKFILRMTGMCTYLQQEPVLPKSSLLYEEFCVLNELNGAHWSIDGDDEHRFDAADREGIIEELFRRKRTVSYGDVAGWMERERNQIGAHVCGGQGEKGFESKLGSYIFFCKDVFKVERLEQSDYPMIERIILWNTLFEDRKILSQRLKEEYGSRLSAEQIKTICKKRFTGWGRLSEKFLTGITVQVDEDSVSIMDVLREGCPVSGKRGRAMVMMEILRDEELGFQKKVDDFNRAFFAENAQALGVNELPGSPAVRRSLNQSIRIVDEIASIAGKAPANIFIEVTRDEDPKKKGRRTKRRYNDLKDALEAFKKEDPELWRELCETAPNDMDERLSLYFMQRGKCLYSGRAIDIHQLSNAGIYEVDHIIPRTYVKDDSLENKALVYREENQRKTDMLLIDPEIRRRMSGYWRMLHEAKLIGDKKFRNLLRSRIDDKALKGFIARQLVETGQMVKLVRSLLEARYPETNIISVKASISHDLRTAAELVKCREANDFHHAHDAFLACRVGLFIQKRHPCVYENPIGLSQVVRNYVRQQADIFKRCRTIPGSSGFIVNSFMTSGFDKETGEIFKDDWDAEAEVEGIRRSLNFRQCFISRMPFEDHGVFWDATIYSPRAKKTAALPLKQGLNPSRYGSFSREQFAYFFIYKARNPRKEQTLFEFAQVPVRLSAQIRQDENALERYARELAKDQGLEFIRIERSKILKNQLIEIDGDRLCITGKEEVRNACELAFAQDEMRVIRMLVSEKPVSRECVISLFNRILLHGDQASRRLSKQLKLALLSEAFSEASDNVQRNVVLGLIAIFNGSTNMVNLSDIGGSKFAGNVRIKYKKELASPKVNVHLIDQSVTGMFERRTKIGL

SEQ ID NO: 317 - protein, 1391 aa, Eubacterium yurii
MENKQYYIGLDVGTNSVGWAVTDTSYNLLRAKGKDMWGARLFEKANTAAERRTKRTSRRRSEREKARKAMLKELFADEINRVDPSFFIRLEESKFFLDDRSENNRQRYTLFNDATFTDKDYYEKYKTIFHLRSALINSDEKFDVRLVFLAILNLFSHRGHFLNASLKGDGDIQGMDVFYNDLVESCEYFEIELPRITNIDNFEKILSQKGKSRTKILEELSEELSISKKDKSKYNLIKLISGLEASVVELYNIEDIQDENKKIKIGFRESDYEESSLKVKEIIGDEYFDLVERAKSVHDMGLLSNIIGNSKYLCEARVEAYENHHKDLLKIKELLKKYDKKAYNDMFRKMTDKNYSAYVGSVNSNIAKERRSVDKRKIEDLYKYIEDTALKNIPDDNKDKIEILEKIKLGEFLKKQLTASNGVIPNQLQSRELRAILKKAENYLPFLKEKGEKNLTVSEMIIQLFEFQIPYYVGPLDKNPKKDNKANSWAKIKQGGRILPWNFEDKVDVKGSRKEFIEKMVRKCTYISDEHTLPKQSLLYEKFMVLNEINNIKIDGEKISVEAKQKIYNDLFVKGKKVSQKDIKKELISLNIMDKDSVLSGTDTVCNAYLSSIGKFTGVFKEEINKQSIVDMIEDIIFLKTVYGDEKRFVKEEIVEKYGDEIDKDKIKRILGFKFSNWGNLSKSFLELEGADVGTGEVRSIIQSLWETNFNLMELLSSRFTYMDELEKRVKKLEKPLSEWTIEDLDDMYLSSPVKRMIWQSMKIVDEIQTVIGYAPKRIFVEMTRSEGEKVRTKSRKDRLKELYNGIKEDSKQWVKELDSKDESYFRSKKMYLYYLQKGRCMYSGEVIELDKLMDDNLYDIDHIYPRSFVKDDSLDNLVLVKKEINNRKQNDPITPQIQASCQGFWKILHDQGFMSNEKYSRLTRKTQEFSDEEKLSFINRQIVETGQATKCMAQILQKSMGEDVDVVFSKARLVSEFRHKFELFKSRLINDFHHANDAYLNIVVGNSYFVKFTRNPANFIKDARKNPDNPVYKYHMDRFFERDVKSKSEVAWIGQSEGNSGTIVIVKKTMAKNSPLITKKVEEGHGSITKETIVGVKEIKFGRNKVEKADKTPKKPNLQAYRPIKTSDERLCNILRYGGRTSISISGYCLVEYVKKRKTIRSLEAIPVYLGRKDSLSEEKLLNYFRYNLNDGGKDSVSDIRLCLPFISTNSLVKIDGYLYYLGGKNDDRIQLYNAYQLKMKKEEVEYIRKIEKAVSMSKFDEIDREKNPVLTEEKNIELYNKIQDKFENTVFSKRMSLVKYNKKDLSFGDFLKNKKSKFEEIDLEKQCKVLYNIIFNLSNLKEVDLSDIGGSKSTGKCRCKKNITNYKEFKLIQQSITGLYSCEKDLMTI

SEQ ID NO: 318 - protein, 1364 aa, Peptoniphilus duerdenii
MKNLKEYYIGLDIGTASVGWAVTDESYNIPKFNGKKMWGVRLFDDAKTAEERRTQRGSRRRLNRRKERINLLQDLFATEISKVDPNFFLRLDNSDLYREDKDEKLKSKYTLFNDKDFKDRDYHKKYPTIHHLIMDLIEDEGKKDIRLLYLACHYLLKNRGHFIFEGQKFDTKNSFDKSINDLKIHLRDEYNIDLEFNNEDLIEIITDTTLNKTNKKKELKNIVGDTKFLKAISAIMIGSSQKLVDLFEDGEFEETTVKSVDFSTTAFDDKYSEYEEALGDTISLLNILKSIYDSSILENLLKDADKSKDGNKYISKAFVKKFNKHGKDLKTLKRIIKKYLPSEYANIFRNKSINDNYVAYTKSNITSNKRTKASKFTKQEDFYKFIKKHLDTIKETKLNSSENEDLKLIDEMLTDIEFKTFIPKLKSSDNGVIPYQLKLMELKKILDNQSKYYDFLNESDEYGTVKDKVESIMEFRIPYYVGPLNPDSKYAWIKRENTKITPWNFKDIVDLDSSREEFIDRLIGRCTYLKEEKVLPKASLIYNEFMVLNELNNLKLNEFLITEEMKKAIFEELFKTKKKVTLKAVSNLLKKEFNLTGDILLSGTDGDFKQGLNSYIDFKNIIGDKVDRDDYRIKIEEIIKLIVLYEDDKTYLKKKIKSAYKNDFTDDEIKKIAALNYKDWGRLSKRFLTGIEGVDKTTGEKGSIIYFMREYNLNLMELMSGHYTFTEEVEKLNPVENRELCYEMVDELYLSPSVKRMLWQSLRVVDEIKRIIGKDPKKIFIEMARAKEAKNSRKESRKNKLLEFYKFGKKAFINEIGEERYNYLLNEINSEEESKFRWDNLYLYYTQLGRCMYSLEPIDLADLKSNNIYDQDHIYPKSKIYDDSLENRVLVKKNLNHEKGNQYPIPEKVLNKNAYGFWKILFDKGLIGQKKYTRLTRRTPFEERELAEFIERQIVETRQATKETANLLKNICQDSEIVYSKAENASRFRQEFDIIKCRTVNDLHHMHDAYLNIVVGNVYNTKFTKNPLNFIKDKDNVRSYNLENMFKYDVVRGSYTAWIADDSEGNVKAATIKKVKRELEGKNYRFTRMSYIGTGGLYDQNLMRKGKGQIPQKENTNKSNIEKYGGYNKASSAYFALIESDGKAGRERTLETIPIMVYNQEKYGNTEAVDKYLKDNLELQDPKILKDKIKINSLIKLDGFLYNIKGKTGDSLSIAGSVQLIVNKEEQKLIKKMDKFLVKKKDNKDIKVTSFDNIKEEELIKLYKTLSDKLNNGIYSNKRNNQAKNISEALDKFKEISIEEKIDVLNQIILLFQSYNNGCNLKSIGLSAKTGVVFIPKKLNYKECKLINQSITGLFENEVDLLNL

SEQ ID NO: 319 - protein, 1358 aa, Acidaminococcus sp. D21
MGKMYYLGLDIGTNSVGYAVTDPSYHLLKFKGEPMWGAHVFAAGNQSAERRSFRTSRRRLDRRQQRVKLVQEIFAPVISPIDPRFFIRLHESALWRDDVAETDKHIFFNDPTYTDKEYYSDYPTIHHLIVDLMESSEKHDPRLVYLAVAWLVAHRGHFLNEVDKDNIGDVLSFDAFYPEFLAFLSDNGVSPWVCESKALQATLLSRNSVNDKYKALKSLIFGSQKPEDNFDANISEDGLIQLLAGKKVKVNKLFPQESNDASFTLNDKEDAIEEILGTLTPDECEWIAHIRRLFDWAIMKHALKDGRTISESKVKLYEQHHHDLTQLKYFVKTYLAKEYDDIFRNVDSETTKNYVAYSYHVKEVKGTLPKNKATQEEFCKYVLGKVKNIECSEADKVDFDEMIQRLTDNSFMPKQVSGENRVIPYQLYYYELKTILNKAASYLPFLTQCGKDAISNQDKLLSIMTFRIPYFVGPLRKDNSEHAWLERKAGKIYPWNFNDKVDLDKSEEAFIRRMTNTCTYYPGEDVLPLDSLIYEKFMILNEINNIRIDGYPISVDVKQQVFGLFEKKRRVTVKDIQNLLLSLGALDKHGKLTGIDTTIHSNYNTYHHFKSLMERGVLTRDDVERIVERMTYSDDTKRVRLWLNNNYGTLTADDVKHISRLRKHDFGRLSKMFLTGLKGVHKETGERASILDFMWNTNDNLMQLLSECYTFSDEITKLQEAYYAKAQLSLNDFLDSMYISNAVKRPIYRTLAVVNDIRKACGTAPKRIFIEMARDGESKKKRSVTRREQIKNLYRSIRKDFQQEVDFLEKILENKSDGQLQSDALYLYFAQLGRDMYTGDPIKLEHIKDQSFYNIDHIYPQSMVKDDSLDNKVLVQSEINGEKSSRYPLDAAIRNKMKPLWDAYYNHGLISLKKYQRLTRSTPFTDDEKWDFINRQLVETRQSTKALAILLKRKFPDTEIVYSKAGLSSDFRHEFGLVKSRNINDLHHAKDAFLAIVTGNVYHERFNRRWFMVNQPYSVKTKTLFTHSIKNGNFVAWNGEEDLGRIVKMLKQNKNTIHFTRFSFDRKEGLFDIQPLKASTGLVPRKAGLDVVKYGGYDKSTAAYYLLVRFTLEDKKTQHKLMMIPVEGLYKARIDHDKEFLTDYAQTTISEILQKDKQKVINIMFPMGTRHIKLNSMISIDGFYLSIGGKSSKGKSVLCHAMVPLIVPHKIECYIKAMESFARKFKENNKLRIVEKFDKITVEDNLNLYELFLQKLQHNPYNKFFSTQFDVLTNGRSTFTKLSPEEQVQTLLNILSIFKTCRSSGCDLKSINGSAQAARIMISADLTGLSKKYSDIRLVEQSASGLFVSKSQNLLEYL

SEQ ID NO: 320 - protein, 1356 aa, Lactobacillus farciminis
MTKKEQPYNIGLDIGTSSVGWAVTNDNYDLLNIKKKNLWGVRLFEEAQTAKETRLNRSTRRRYRRRKNRINWLNEIFSEELAKTDPSFLIRLQNSWVSKKDPDRKRDKYNLFIDGPYTDKEYYREFPTIFHLRKELILNKDKADIRLIYLALHNILKYRGNFTYEHQKFNISNLNNNLSKELIELNQQLIKYDISFPDDCDWNHISDILIGRGNATQKSSNILKDFTLDKETKKLLKEVINLILGNVAHLNTIFKTSLTKDEEKLNFSGKDIESKLDDLDSILDDDQFTVLDAANRIYSTITLNEILNGESYFSMAKVNQYENHAIDLCKLRDMWHTTKNEEAVEQSRQAYDDYINKPKYGTKELYTSLKKFLKVALPTNLAKEAEEKISKGTYLVKPRNSENGVVPYQLNKIEMEKIIDNQSQYYPFLKENKEKLLSILSFRIPYYVGPLQSAEKNPFAWMERKSNGHARPWNFDEIVDREKSSNKFIRRMTVTDSYLVGEPVLPKNSLIYQRYEVLNELNNIRITENLKTNPIGSRLTVETKQRIYNELFKKYKKVTVKKLTKWLIAQGYYKNPILIGLSQKDEFNSTLTTYLDMKKIFGSSFMEDNKNYDQIEELIEWLTIFEDKQILNEKLHSSKYSYTPDQIKKISNMRYKGWGRLSKKILMDITTETNTPQLLQLSNYSILDLMWATNNNFISIMSNDKYDFKNYIENHNLNKNEDQNISDLVNDIHVSPALKRGITQSIKIVQEIVKFMGHAPKHIFIEVTRETKKSEITTSREKRIKRLQSKLLNKANDFKPQLREYLVPNKKIQEELKKHKNDLSSERIMLYFLQNGKSLYSEESLNINKLSDYQVDHILPRTYIPDDSLENKALVLAKENQRKADDLLLNSNVIDRNLERWTYMLNNNMIGLKKFKNLTRRVITDKDKLGFIHRQLVQTSQMVKGVANILDNMYKNQGTTCIQARANLSTAFRKALSGQDDTYHFKHPELVKNRNVNDFHHAQDAYLASFLGTYRLRRFPTNEMLLMNGEYNKFYGQVKELYSKKKKLPDSRKNGFIISPLVNGTTQYDRNTGEIIWNVGFRDKILKIFNYHQCNVTRKTEIKTGQFYDQTIYSPKNPKYKKLIAQKKDMDPNIYGGFSGDNKSSITIVKIDNNKIKPVAIPIRLINDLKDKKTLQNWLEENVKHKKSIQIIKNNVPIGQIIYSKKVGLLSLNSDREVANRQQLILPPEHSALLRLLQIPDEDLDQILAFYDKNILVEILQELITKMKKFYPFYKGEREFLIANIENFNQATTSEKVNSLEELITLLHANSTSAHLIFNNIEKKAFGRKTHGLTLNNTDFIYQSVTGLYETRIHIE

SEQ ID NO: 321 - protein, 1421 aa, Streptococcus sanguinis
MTKFNKNYSIGLDIGVSSVGYAVVTEDYRVPAFKFKVLGNTEKEKIKKNLIGSTTFVSAQPAKGTRVFRVNRRRIDRRNHRITYLRDIFQKEIEKVDKNFYRRLDESFRVLGDKSEDLQIKQPFFGDKELETAYHKKYPTIYHLRKHLADADKNSPVADIREVYMAISHILKYRGHFLTLDKINPNNINMQNSWIDFIESCQEVFDLEISDESKNIADIFKSSENRQEKVKKILPYFQQELLKKDKSIFKQLLQLLFGLKTKFKDCFELEEEPDLNFSKENYDENLENFLGSLEEDFSDVFAKLKVLRDTILLSGMLTYTGATHARFSATMVERYEEHRKDLQRFKFFIKQNLSEQDYLDIFGRKTQNGFDVDKETKGYVGYITNKMVLTNPQKQKTIQQNFYDYISGKITGIEGAEYFLNKISDGTFLRKLRTSDNGAIPNQIHAYELEKIIERQGKDYPFLLENKDKLLSILTFKIPYYVGPLAKGSNSRFAWIKRATSSDILDDNDEDTRNGKIRPWNYQKLINMDETRDAFITNLIGNDIILLNEKVLPKRSLIYEEVMLQNELTRVKYKDKYGKAHFFDSELRQNIINGLFKNNSKRVNAKSLIKYLSDNHKDLNAIEIVSGVEKGKSFNSTLKTYNDLKTIFSEELLDSEIYQKELEEIIKVITVFDDKKSIKNYLTKFFGHLEILDEEKINQLSKLRYSGWGRYSAKLLLDIRDEDTGFNLLQFLRNDEENRNLTKLISDNTLSFEPKIKDIQSKSTIEDDIFDEIKKLAGSPAIKRGILNSIKIVDELVQIIGYPPHNIVIEMARENMTTEEGQKKAKTRKTKLESALKNIENSLLENGKVPHSDEQLQSEKLYLYYLQNGKDMYTLDKTGSPAPLYLDQLDQYEVDHIIPYSFLPIDSIDNKVLTHRENNQQKLNNIPDKETVANMKPFWEKLYNAKLISQTKYQRLTTSERTPDGVLTESMKAGFIERQLVETRQIIKHVARILDNRFSDTKIITLKSQLITNFRNTFHIAKIRELNDYHHAHDAYLAVVVGQTLLKVYPKLAPELIYGHHAHFNRHEENKATLRKHLYSNIMRFFNNPDSKVSKDIWDCNRDLPIIKDVIYNSQINFVKRTMIKKGAFYNQNPVGKFNKQLAANNRYPLKTKALCLDTSIYGGYGPMNSALSIIIIAERFNEKKGKIETVKEFHDIFIIDYEKFNNNPFQFLNDTSENGFLKKNNINRVLGFYRIPKYSLMQKIDGTRMLFESKSNLHKATQFKLTKTQNELFFHMKRLLTKSNLMDLKSKSAIKESQNFILKHKEEFDNISNQLSAFSQKMLGNTTSLKNLIKGYNERKIKEIDIRDETIKYFYDNFIKMFSFVKSGAPKDINDFFDNKCTVARMRPKPDKKLLNATLIHQSITGLYETRIDLSKLGED

SEQ ID NO: 322 - protein, 1338 aa, Coprococcus catus
MKQEYFLGLDMGTGSLGWAVTDSTYQVMRKHGKALWGTRLFESASTAEERRMFRTARRRLDRRNWRIQVLQEIFSEEISKVDPGFFLRMKESKYYPEDKRDAEGNCPELPYALFVDDNYTDKNYHKDYPTIYHLRKMLMETTEIPDIRLVYLVLHHMMKHRGHFLLSGDISQIKEFKSTFEQLIQNIQDEELEWHISLDDAAIQFVEHVLKDRNLTRSTKKSRLIKQLNAKSACEKAILNLLSGGTVKLSDIFNNKELDESERPKVSFADSGYDDYIGIVEAELAEQYYIIASAKAVYDWSVLVEILGNSVSISEAKIKVYQKHQADLKTLKKIVRQYMTKEDYKRVFVDTEEKLNNYSAYIGMTKKNGKKVDLKSKQCTQADFYDFLKKNVIKVIDHKEITQEIESEIEKENFLPKQVTKDNGVIPYQVHDYELKKILDNLGTRMPFIKENAEKIQQLFEFRIPYYVGPLNRVDDGKDGKFTWSVRKSDARIYPWNFTEVIDVEASAEKFIRRMTNKCTYLVGEDVLPKDSLVYSKFMVLNELNNLRLNGEKISVELKQRIYEELFCKYRKVTRKKLERYLVIEGIAKKGVEITGIDGDFKASLTAYHDFKERLTDVQLSQRAKEAIVLNVVLFGDDKKLLKQRLSKMYPNLTTGQLKGICSLSYQGWGRLSKTFLEEITVPAPGTGEVWNIMTALWQTNDNLMQLLSRNYGFTNEVEEFNTLKKETDLSYKTVDELYVSPAVKRQIWQTLKVVKEIQKVMGNAPKRVFVEMAREKQEGKRSDSRKKQLVELYRACKNEERDWITELNAQSDQQLRSDKLFLYYIQKGRCMYSGETIQLDELWDNTKYDIDHIYPQSKTMDDSLNNRVLVKKNYNAIKSDTYPLSLDIQKKMMSFWKMLQQQGFITKEKYVRLVRSDELSADELAGFIERQIVETRQSTKAVATILKEALPDTEIVYVKAGNVSNFRQTYELLKVREMNDLHHAKDAYLNIVVGNAYFVKFTKNAAWFIRNNPGRSYNLKRMFEFDIERSGEIAWKAGNKGSIVTVKKVMQKNNILVTRKAYEVKGGLFDQQIMKKGKGQVPIKGNDERLADIEKYGGYNKAAGTYFMLVKSLDKKGKEIRTIEFVPLYLKNQIEINHESAIQYLAQERGLNSPEILLSKIKIDTLFKVDGFKMWLSGRTGNQLIFKGANQLILSHQEAAILKGVVKYVNRKNENKDAKLSERDGMTEEKLLQLYDTFLDKLSNTVYSIRLSAQIKTLTEKRAKFIGLSNEDQCIVLNEILHMFQCQSGSANLKLIGGPGSAGILVMNNNITACKQISVINQSPTGIYEKEIDLIKL

SEQ ID NO: 323-325 - skipped (3 entries)

SEQ ID NO: 326 - protein, 1374 aa, Fusobacterium nucleatum
MKKQKFSDYYLGFDIGTNSVGWCVTDLDYNVLRFNKKDMWGSRLFDEAKTAAERRVQRNSRRRLKRRKWRLNLLEEIFSDEIMKIDSNFFRRLKESSLWLEDKNSKEKFTLFNDDNYKDYDFYKQYPTIFHLRDELIKNPEKKDIRLIYLALHSIFKSRGHFLFEGQNLKEIKNFETLYNNLISFLEDNGINKSIDKDNIEKLEKIICDSGKGLKDKEKEFKGIFNSDKQLVAIFKLSVGSSVSLNDLFDTDEYKKEEVEKEKISFREQIYEDDKPIYYSILGEKIELLDIAKSFYDFMVLNNILSDSNYISEAKVKLYEEHKKDLKNLKYIIRKYNKENYDKLFKDKNENNYPAYIGLNKEKDKKEVVEKSRLKIDDLIKVIKGYLPKPERIEEKDKTIFNEILNKIELKTILPKQRISDNGTLPYQIHEVELEKILENQSKYYDFLNYEENGVSTKDKLLKTFKFRIPYYVGPLNSYHKDKGGNSWIVRKEEGKILPWNFEQKVDIEKSAEEFIKRMTNKCTYLNGEDVIPKDSFLYSEYIILNELNKVQVNDEFLNEENKRKIIDELFKENKKVSEKKFKEYLLVNQIANRTVELKGIKDSFNSNYVSYIKFKDIFGEKLNLDIYKEISEKSILWKCLYGDDKKIFEKKIKNEYGDILNKDEIKKINSFKFNTWGRLSEKLLTGIEFINLETGECYSSVMEALRRTNYNLMELLSSKFTLQESIDNENKEMNEVSYRDLIEESYVSPSLKRAILQTLKIYEEIKKITGRVPKKVFIEMARGGDESMKNKKIPARQEQLKKLYDSCGNDIANFSIDIKEMKNSLSSYDNNSLRQKKLYLYYLQFGKCMYTGREIDLDRLLQNNDTYDIDHIYPRSKVIKDDSFDNLVLVLKNENAEKSNEYPVKKEIQEKMKSFWRFLKEKNFISDEKYKRLTGKDDFELRGFMARQLVNVRQTTKEVGKILQQIEPEIKIVYSKAEIASSFREMFDFIKVRELNDTHHAKDAYLNIVAGNVYNTKFTEKPYRYLQEIKENYDVKKIYNYDIKNAWDKENSLEIVKKNMEKNTVNITRFIKEEKGELFNLNPIKKGETSNEIISIKPKLYDGKDNKLNEKYGYYTSLKAAYFIYVEHEKKNKKVKTFERITRIDSTLIKNEKNLIKYLVSQKKLLNPKIIKKIYKEQTLIIDSYPYTFTGVDSNKKVELKNKKQLYLEKKYEQILKNALKFVEDNQGETEENYKFIYLKKRNNNEKNETIDAVKERYNIEFNEMYDKFLEKLSSKDYKNYINNKLYTNFLNSKEKFKKLKLWEKSLILREFLKIFNKNTYGKYEIKDSQTKEKLFSFPEDTGRIRLGQSSLGNNKELLEESVTGLFVKKIKL

SEQ ID NO: 327 - protein, 1333 aa, Planococcus antarcticus
MKNYTIGLDIGVASVGWVCIDENYKILNYNNRHAFGVHEFESAESAAGRRLKRGMRRRYNRRKKRLQLLQSLFDSYITDSGFFSKTDSQHFWKNNNEFENRSLTEVLSSLRISSRKYPTIYHLRSDLIESNKKMDLRLVYLALHNLVKYRGHFLQEGNWSEAASAEGMDDQLLELVTRYAELENLSPLDLSESQWKAAETLLLNRNLTKTDQSKELTAMFGKEYEPFCKLVAGLGVSLHQLFPSSEQALAYKETKTKVQLSNENVEEVMELLLEEESALLEAVQPFYQQVVLYELLKGETYVAKAKVSAFKQYQKDMASLKNLLDKTFGEKVYRSYFISDKNSQREYQKSHKVEVLCKLDQFNKEAKFAETFYKDLKKLLEDKSKTSIGTTEKDEMLRIIKAIDSNQFLQKQKGIQNAAIPHQNSLYEAEKILRNQQAHYPFITTEWIEKVKQILAFRIPYYIGPLVKDTTQSPFSWVERKGDAPITPWNFDEQIDKAASAEAFISRMRKTCTYLKGQEVLPKSSLTYERFEVLNELNGIQLRTTGAESDFRHRLSYEMKCWIIDNVFKQYKTVSTKRLLQELKKSPYADELYDEHTGEIKEVFGTQKENAFATSLSGYISMKSILGAVVDDNPAMTEELIYWIAVFEDREILHLKIQEKYPSITDVQRQKLALVKLPGWGRFSRLLIDGLPLDEQGQSVLDHMEQYSSVFMEVLKNKGFGLEKKIQKMNQHQVDGTKKIRYEDIEELAGSPALKRGIWRSVKIVEELVSIFGEPANIVLEVAREDGEKKRTKSRKDQWEELTKTTLKNDPDLKSFIGEIKSQGDQRFNEQRFWLYVTQQGKCLYTGKALDIQNLSMYEVDHILPQNFVKDDSLDNLALVMPEANQRKNQVGQNKMPLEIIEANQQYAMRTLWERLHELKLISSGKLGRLKKPSFDEVDKDKFIARQLVETRQIIKHVRDLLDERFSKSDIHLVKAGIVSKFRRFSEIPKIRDYNNKHHAMDALFAAALIQSILGKYGKNFLAFDLSKKDRQKQWRSVKGSNKEFFLFKNFGNLRLQSPVTGEEVSGVEYMKHVYFELPWQTTKMTQTGDGMFYKESIFSPKVKQAKYVSPKTEKFVHDEVKNHSICLVEFTFMKKEKEVQETKFIDLKVIEHHQFLKEPESQLAKFLAEKETNSPIIHARIIRTIPKYQKIWIEHFPYYFISTRELHNARQFEISYELMEKVKQLSERSSVEELKIVFGLLIDQMNDNYPIYTKSSIQDRVQKFVDTQLYDFKSFEIGFEELKKAVAANAQRSDTFGSRISKKPKPEEVAIGYESITGLKYRKPRSVVGTKR

SEQ ID NO: 328 - protein, 1395 aa, Treponema denticola
MKKEIKDYFLGLDVGTGSVGWAVTDTDYKLLKANRKDLWGMRCFETAETAEVRRLHRGARRRIERRKKRIKLLQELFSQEIAKTDEGFFQRMKESPFYAEDKTILQENTLFNDKDFADKTYHKAYPTINHLIKAWIENKVKPDPRLLYLACHNIIKKRGHFLFEGDFDSENQFDTSIQALFEYLREDMEVDIDADSQKVKEILKDSSLKNSEKQSRLNKILGLKPSDKQKKAITNLISGNKINFADLYDNPDLKDAEKNSISFSKDDFDALSDDLASILGDSFELLLKAKAVYNCSVLSKVIGDEQYLSFAKVKIYEKHKTDLTKLKNVIKKHFPKDYKKVFGYNKNEKNNNNYSGYVGVCKTKSKKLIINNSVNQEDFYKFLKTILSAKSEIKEVNDILTEIETGTFLPKQISKSNAEIPYQLRKMELEKILSNAEKHFSFLKQKDEKGLSHSEKIIMLLTFKIPYYIGPINDNHKKFFPDRCWVVKKEKSPSGKTTPWNFFDHIDKEKTAEAFITSRTNFCTYLVGESVLPKSSLLYSEYTVLNEINNLQIIIDGKNICDIKLKQKIYEDLFKKYKKITQKQISTFIKHEGICNKTDEVIILGIDKECTSSLKSYIELKNIFGKQVDEISTKNMLEEIIRWATIYDEGEGKTILKTKIKAEYGKYCSDEQIKKILNLKFSGWGRLSRKFLETVTSEMPGFSEPVNIITAMRETQNNLMELLSSEFTFTENIKKINSGFEDAEKQFSYDGLVKPLFLSPSVKKMLWQTLKLVKEISHITQAPPKKIFIEMAKGAELEPARTKTRLKILQDLYNNCKNDADAFSSEIKDLSGKIENEDNLRLRSDKLYLYYTQLGKCMYCGKPIEIGHVFDTSNYDIDHIYPQSKIKDDSISNRVLVCSSCNKNKEDKYPLKSEIQSKQRGFWNFLQRNNFISLEKLNRLTRATPISDDETAKFIARQLVETRQATKVAAKVLEKMFPETKIVYSKAETVSMFRNKFDIVKCREINDFHHAHDAYLNIVVGNVYNTKFTNNPWNFIKEKRDNPKIADTYNYYKVFDYDVKRNNITAWEKGKTIITVKDMLKRNTPIYTRQAACKKGELFNQTIMKKGLGQHPLKKEGPFSNISKYGGYNKVSAAYYTLIEYEEKGNKIRSLETIPLYLVKDIQKDQDVLKSYLTDLLGKKEFKILVPKIKINSLLKINGFPCHITGKTNDSFLLRPAVQFCCSNNEVLYFKKIIRFSEIRSQREKIGKTISPYEDLSFRSYIKENLWKKTKNDEIGEKEFYDLLQKKNLEIYDMLLTKHKDTIYKKRPNSATIDILVKGKEKFKSLIIENQFEVILEILKLFSATRNVSDLQHIGGSKYSGVAKIGNKISSLDNCILIYQSITGIFEKRIDLLKV

SEQ ID NO: 329 - protein, 1327 aa, Solobacterium moorei
MEGQMKNNGNNLQQGNYYLGLDVGTSSVGWAVTDTDYNVLKFRGKSMWGARLFDEASTAEERRTHRGNRRRLARRKYRLLLLEQLFEKEIRKIDDNFFVRLHESNLWADDKSKPSKFLLFNDTNFTDKDYLKKYPTIYHLRSDLIHNSTEHDIRLVFLALHHLIKYRGHFIYDNSANGDVKTLDEAVSDFEEYLNENDIEFNIENKKEFINVLSDKHLTKKEKKISLKKLYGDITDSENINISVLIEMLSGSSISLSNLFKDIEFDGKQNLSLDSDIEETLNDVVDILGDNIDLLIHAKEVYDIAVLTSSLGKHKYLCDAKVELFEKNKKDLMILKKYIKKNHPEDYKKIFSSPTEKKNYAAYSQTNSKNVCSQEEFCLFIKPYIRDMVKSENEDEVRIAKEVEDKSFLTKLKGTNNSVVPYQIHERELNQILKNIVAYLPFMNDEQEDISVVDKIKLIFKFKIPYYVGPLNTKSTRSWVYRSDEKIYPWNFSNVIDLDKTAHEFMNRLIGRCTYTNDPVLPMDSLLYSKYNVLNEINPIKVNGKAIPVEVKQAIYTDLFENSKKKVTRKSIYIYLLKNGYIEKEDIVSGIDIEIKSKLKSHHDFTQIVQENKCTPEEIERIIKGILVYSDDKSMLRRWLKNNIKGLSENDVKYLAKLNYKEWGRLSKTLLTDIYTINPEDGEACSILDIMWNTNATLMEILSNEKYQFKQNIENYKAENYDEKQNLHEELDDMYISPAARRSIWQALRIVDEIVDIKKSAPKKIFIEMAREKKSAMKKKRTESRKDTLLELYKSCKSQADGFYDEELFEKLSNESNSRLRRDQLYLYYTQMGRSMYTGKRIDFDKLINDKNTYDIDHIYPRSKIKDDSITNRVLVEKDINGEKTDIYPISEDIRQKMQPFWKILKEKGLINEEKYKRLTRNYELTDEELSSFVARQLVETQQSTKALATLLKKEYPSAKIVYSKAGNVSEFRNRKDKELPKFREINDLHHAKDAYLNIVVGNVYDTKFTEKFFNNIRNENYSLKRVFDFSVPGAWDAKGSTFNTIKKYMAKNNPIIAFAPYEVKGELFDQQIVPKGKGQFPIKQGKDIEKYGGYNKLSSAFLFAVEYKGKKARERSLETVYIKDVELYLQDPIKYCESVLGLKEPQIIKPKILMGSLFSINNKKLVVTGRSGKQYVCHHIYQLSINDEDSQYLKNIAKYLQEEPDGNIERQNILNITSVNNIKLFDVLCTKFNSNTYEIILNSLKNDVNEGREKFSELDILEQCNILLQLLKAFKCNRESSNLEKLNNKKQAGVIVIPHLFTKCSVFKVIHQSITGLFEKEMDLLK

SEQ ID NO: 330 - protein, 1334 aa, Staphylococcus pseudintermedius
MGRKPYILSLDIGTGSVGYACMDKGFNVLKYHDKDALGVYLFDGALTAQERRQFRTSRRRKNRRIKRLGLLQELLAPLVQNPNFYQFQRQFAWKNDNMDFKNKSLSEVLSFLGYESKKYPTIYHLQEALLLKDEKFDPELIYMALYHLVKYRGHFLFDHLKIENLTNNDNMHDFVELIETYENLNNIKLNLDYEKTKVIYEILKDNEMTKNDRAKRVKNMEKKLEQFSIMLLGLKFNEGKLFNHADNAEELKGANQSHTFADNYEENLTPFLTVEQSEFIERANKIYLSLTLQDILKGKKSMAMSKVAAYDKFRNELKQVKDIVYKADSTRTQFKKIFVSSKKSLKQYDATPNDQTFSSLCLFDQYLIRPKKQYSLLIKELKKIIPQDSELYFEAENDTLLKVLNTTDNASIPMQINLYEAETILRNQQKYHAEITDEMIEKVLSLIQFRIPYYVGPLVNDHTASKFGWMERKSNESIKPWNFDEVVDRSKSATQFIRRMTNKCSYLINEDVLPKNSLLYQEMEVLNELNATQIRLQTDPKNRKYRMMPQIKLFAVEHIFKKYKTVSHSKFLEIMLNSNHRENFMNHGEKLSIFGTQDDKKFASKLSSYQDMTKIFGDIEGKRAQIEEIIQWITIFEDKKILVQKLKECYPELTSKQINQLKKLNYSGWGRLSEKLLTHAYQGHSIIELLRHSDENFMEILTNDVYGFQNFIKEENQVQSNKIQHQDIANLTTSPALKKGIWSTIKLVRELTSIFGEPEKIIMEFATEDQQKGKKQKSRKQLWDDNIKKNKLKSVDEYKYIIDVANKLNNEQLQQEKLWLYLSQNGKCMYSGQSIDLDALLSPNATKHYEVDHIFPRSFIKDDSIDNKVLVIKKMNQTKGDQVPLQFIQQPYERIAYWKSLNKAGLISDSKLHKLMKPEFTAMDKEGFIQRQLVETRQISVHVRDFLKEEYPNTKVIPMKAKMVSEFRKKFDIPKIRQMNDAHHAIDAYLNGVVYHGAQLAYPNVDLFDFNFKWEKVREKWKALGEFNTKQKSRELFFFKKLEKMEVSQGERLISKIKLDMNHFKINYSRKLANIPQQFYNQTAVSPKTAELKYESNKSNEVVYKGLTPYQTYVVAIKSVNKKGKEKMEYQMIDHYVFDFYKFQNGNEKELALYLAQRENKDEVLDAQIVYSLNKGDLLYINNHPCYFVSRKEVINAKQFELTVEQQLSLYNVMNNKETNVEKLLIEYDFIAEKVINEYHHYLNSKLKEKRVRTFFSESNQTHEDFIKALDELFKVVTASATRSDKIGSRKNSMTHRAFLGKGKDVKIAYTSISGLKTTKPKSLFKLAESRNEL

SEQ ID NO: 331 - protein, 1472 aa, Flavobacterium branchiophilum
MAKILGLDLGTNSIGWAVVERENIDFSLIDKGVRIFSEGVKSEKGIESSRAAERTGYRSARKIKYRRKLRKYETLKVLSLNRMCPLSIEEVEEWKKSGFKDYPLNPEFLKWLSTDEESNVNPYFFRDRASKHKVSLFELGRAFYHIAQRRGFLSNRLDQSAEGILEEHCPKIEAIVEDLISIDEISTNITDYFFETGILDSNEKNGYAKDLDEGDKKLVSLYKSLLAILKKNESDFENCKSEIIERLNKKDVLGKVKGKIKDISQAMLDGNYKTLGQYFYSLYSKEKIRNQYTSREEHYLSEFITICKVQGIDQINEEEKINEKKFDGLAKDLYKAIFFQRPLKSQKGLIGKCSFEKSKSRCAISHPDFEEYRMWTYLNTIKIGTQSDKKLRFLTQDEKLKLVPKFYRKNDFNFDVLAKELIEKGSSFGFYKSSKKNDFFYWFNYKPTDTVAACQVAASLKNAIGEDWKTKSFKYQTINSNKEQVSRTVDYKDLWHLLTVATSDVYLYEFAIDKLGLDEKNAKAFSKTKLKKDFASLSLSAINKILPYLKEGLLYSHAVFVANIENIVDENIWKDEKQRDYIKTQISEIIENYTLEKSRFEIINGLLKEYKSENEDGKRVYYSKEAEQSFENDLKKKLVLFYKSNEIENKEQQETIFNELLPIFIQQLKDYEFIKIQRLDQKVLIFLKGKNETGQIFCTEEKGTAEEKEKKIKNRLKKLYHPSDIEKFKKKIIKDEFGNEKIVLGSPLTPSIKNPMAMRALHQLRKVLNALILEGQIDEKTIIHIEMARELNDANKRKGIQDYQNDNKKFREDAIKEIKKLYFEDCKKEVEPTEDDILRYQLWMEQNRSEIYEEGKNISICDIIGSNPAYDIEHTIPRSRSQDNSQMNKTLCSQRFNREVKKQSMPIELNNHLEILPRIAHWKEEADNLTREIEIISRSIKAAATKEIKDKKIRRRHYLTLKRDYLQGKYDRFIWEEPKVGFKNSQIPDTGIITKYAQAYLKSYFKKVESVKGGMVAEFRKIWGIQESFIDENGMKHYKVKDRSKHTHHTIDAITIACMTKEKYDVLAHAWTLEDQQNKKEARSIIEASKPWKTFKEDLLKIEEEILVSHYTPDNVKKQAKKIVRVRGKKQFVAEVERDVNGKAVPKKAASGKTIYKLDGEGKKLPRLQQGDTIRGSLHQDSIYGAIKNPLNTDEIKYVIRKDLESIKGSDVESIVDEVVKEKIKEAIANKVLLLSSNAQQKNKLVGTVWMNEEKRIAINKVRIYANSVKNPLHIKEHSLLSKSKHVHKQKVYGQNDENYAMAIYELDGKRDFELINIFNLAKLIKQGQGFYPLHKKKEIKGKIVFVPIEKRNKRDVVLKRGQQVVFYDKEVENPKDISEIVDFKGRIYIIEGLSIQRIVRPSGKVDEYGVIMLRYFKEARKADDIKQDNFKPDGVFKLGENKPTRKMNHQFTAFVEGIDFKVLPSGKFEKI

SEQ ID NO: 332 - protein, 1688 aa, Ignavibacterium album
MEFKKVLGLDIGTNSIGCALLSLPKSIQDYGKGGRLEWLTSRVIPLDADYMKAFIDGKNGLPQVITPAGKRRQKRGSRRLKHRYKLRRSRLIRVFKTLNWLPEDFPLDNPKRIKETISTEGKFSFRISDYVPISDESYREFYREFGYPENEIEQVIEEINFRRKTKGKNKNPMIKLLPEDWVVYYLRKKALIKPTTKEELIRIIYLFNQRRGFKSSRKDLTETAILDYDEFAKRLAEKEKYSAENYETKFVSITKVKEVVELKTDGRKGKKRFKVILEDSRIEPYEIERKEKPDWEGKEYTFLVTQKLEKGKFKQNKPDLPKEEDWALCTTALDNRMGSKHPGEFFFDELLKAFKEKRGYKIRQYPVNRWRYKKELEFIWTKQCQLNPELNNLNINKEILRKLATVLYPSQSKFFGPKIKEFENSDVLHIISEDIIYYQRDLKSQKSLISECRYEKRKGIDGEIYGLKCIPKSSPLYQEFRIWQDIHNIKVIRKESEVNGKKKINIDETQLYINENIKEKLFELFNSKDSLSEKDILELISLNIINSGIKISKKEEETTHRINLFANRKELKGNETKSRYRKVFKKLGFDGEYILNHPSKLNRLWHSDYSNDYADKEKTEKSILSSLGWKNRNGKWEKSKNYDVFNLPLEVAKAIANLPPLKKEYGSYSALAIRKMLVVMRDGKYWQHPDQIAKDQENTSLMLFDKNLIQLTNNQRKVLNKYLLTLAEVQKRSTLIKQKLNEIEHNPYKLELVSDQDLEKQVLKSFLEKKNESDYLKGLKTYQAGYLIYGKHSEKDVPIVNSPDELGEYIRKKLPNNSLRNPIVEQVIRETIFIVRDVWKSFGIIDEIHIELGRELKNNSEERKKTSESQEKNFQEKERARKLLKELLNSSNFEHYDENGNKIFSSFTVNPNPDSPLDIEKFRIWKNQSGLTDEELNKKLKDEKIPTEIEVKKYILWLTQKCRSPYTGKIIPLSKLFDSNVYEIEHIIPRSKMKNDSTNNLVICELGVNKAKGDRLAANFISESNGKCKFGEVEYTLLKYGDYLQYCKDTFKYQKAKYKNLLATEPPEDFIERQINDTRYIGRKLAELLTPVVKDSKNIIFTIGSITSELKITWGLNGVWKDILRPRFKRLESIINKKLIFQDEDDPNKYHFDLSINPQLDKEGLKRLDHRHHALDATIIAATTREHVRYLNSLNAADNDEEKREYFLSLCNHKIRDFKLPWENFTSEVKSKLLSCVVSYKESKPILSDPFNKYLKWEYKNGKWQKVFAIQIKNDRWKAVRRSMFKEPIGTVWIKKIKEVSLKEAIKIQAIWEEVKNDPVRKKKEKYIYDDYAQKVIAKIVQELGLSSSMRKQDDEKLNKFINEAKVSAGVNKNLNTTNKTIYNLEGRFYEKIKVAEYVLYKAKRMPLNKKEYIEKLSLQKMFNDLPNFILEKSILDNYPEILKELESDNKYIIEPHKKNNPVNRLLLEHILEYHNNPKEAFSTEGLEKLNKKAINKIGKPIKYITRLDGDINEEEIFRGAVFETDKGSNVYFVMYENNQTKDREFLKPNPSISVLKAIEHKNKIDFFAPNRLGFSRIILSPGDLVYVPTNDQYVLIKDNSSNETIINWDDNEFISNRIYQVKKFTGNSCYFLKNDIASLILSYSASNGVGEFGSQNISEYSVDDPPIRIKDVCIKIRVDRLGNVRPL

SEQ ID NO: 333 - protein, 1415 aa, Bergeyella zoohelcum
MKHILGLDLGTNSIGWALIERNIEEKYGKIIGMGSRIVPMGAELSKFEQGQAQTKNADRRTNRGARRLNKRYKQRRNKLIYILQKLDMLPSQIKLKEDFSDPNKIDKITILPISKKQEQLTAFDLVSLRVKALTEKVGLEDLGKIIYKYNQLRGYAGGSLEPEKEDIFDEEQSKDKKNKSFIAFSKIVFLGEPQEEIFKNKKLNRRAIIVETEEGNFEGSTFLENIKVGDSLELLINISASKSGDTITIKLPNKTNWRKKMENIENQLKEKSKEMGREFYISEFLLELLKENRWAKIRNNTILRARYESEFEAIWNEQVKHYPFLENLDKKTLIEIVSFIFPGEKESQKKYRELGLEKGLKYIIKNQVVFYQRELKDQSHLISDCRYEPNEKAIAKSHPVFQEYKVWEQINKLIVNTKIEAGTNRKGEKKYKYIDRPIPTALKEWIFEELQNKKEITFSAIFKKLKAEFDLREGIDFLNGMSPKDKLKGNETKLQLQKSLGELWDVLGLDSINRQIELWNILYNEKGNEYDLTSDRTSKVLEFINKYGNNIVDDNAEETAIRISKIKFARAYSSLSLKAVERILPLVRAGKYFNNDFSQQLQSKILKLLNENVEDPFAKAAQTYLDNNQSVLSEGGVGNSIATILVYDKHTAKEYSHDELYKSYKEINLLKQGDLRNPLVEQIINEALVLIRDIWKNYGIKPNEIRVELARDLKNSAKERATIHKRNKDNQTINNKIKETLVKNKKELSLANIEKVKLWEAQRHLSPYTGQPIPLSDLFDKEKYDVDHIIPISRYFDDSFTNKVISEKSVNQEKANRTAMEYFEVGSLKYSIFTKEQFIAHVNEYFSGVKRKNLLATSIPEDPVQRQIKDTQYIAIRVKEELNKIVGNENVKTTTGSITDYLRNHWGLTDKFKLLLKERYEALLESEKFLEAEYDNYKKDFDSRKKEYEEKEVLFEEQELTREEFIKEYKENYIRYKKNKLIIKGWSKRIDHRHHAIDALIVACTEPAHIKRLNDLNKVLQDWLVEHKSEFMPNFEGSNSELLEEILSLPENERTEIFTQIEKFRAIEMPWKGFPEQVEQKLKEIIISHKPKDKLLLQYNKAGDRQIKLRGQLHEGTLYGISQGKEAYRIPLTKFGGSKFATEKNIQKIVSPFLSGFIANHLKEYNNKKEEAFSAEGIMDLNNKLAQYRNEKGELKPHTPISTVKIYYKDPSKNKKKKDEEDLSLQKLDREKAFNEKLYVKTGDNYLFAVLEGEIKTKKTSQIKRLYDIISFFDATNFLKEEFRNAPDKKTFDKDLLFRQYFEERNKAKLLFTLKQGDFVYLPNENEEVILDKESPLYNQYWGDLKERGKNIYVVQKFSKKQIYFIKHTIADIIKKDVEFGSQNCYETVEGRSIKENCFKLEIDRLGNIVKVIKR

SEQ ID NO: 334 - protein, 1166 aa, Nitrobacter hamburgensis
MHVEIDFPHFSRGDSHLAMNKNEILRGSSVLYRLGLDLGSNSLGWFVTHLEKRGDRHEPVALGPGGVRIFPDGRDPQSGTSNAVDRRMARGARKRRDRFVERRKELIAALIKYNLLPDDARERRALEVLDPYALRKTALTDTLPAHHVGRALFHLNQRRGFQSNRKTDSKQSEDGAIKQAASRLATDKGNETLGVFFADMHLRKSYEDRQTAIRAELVRLGKDHLTGNARKKIWAKVRKRLFGDEVLPRADAPHGVRARATITGTKASYDYYPTRDMLRDEFNAIWAGQSAHHATITDEARTEIEHIIFYQRPLKPAIVGKCTLDPATRPFKEDPEGYRAPWSHPLAQRFRILSEARNLEIRDTGKGSRRLTKEQSDLVVAALLANREVKFDKLRTLLKLPAEARFNLESDRRAALDGDQTAARLSDKKGFNKAWRGFPPERQIAIVARLEETEDENELIAWLEKECALDGAAAARVANTTLPDGHCRLGLRAIKKIVPIMQDGLDEDGVAGAGYHIAAKRAGYDHAKLPTGEQLGRLPYYGQWLQDAVVGSGDARDQKEKQYGQFPNPTVHIGLGQLRRVVNDLIDKYGPPTEISIEFTRALKLSEQQKAERQREQRRNQDKNKARAEELAKFGRPANPRNLLKMRLWEELAHDPLDRKCVYTGEQISIERLLSDEVDIDHILPVAMTLDDSPANKIICMRYANRHKRKQTPSEAFGSSPTLQGHRYNWDDIAARATGLPRNKRWRFDANAREEFDKRGGFLARQLNETGWLARLAKQYLGAVTDPNQIWVVPGRLTSMLRGKWGLNGLLPSDNYAGVQDKAEEFLASTDDMEFSGVKNRADHRHHAIDGLVTALTDRSLLWKMANAYDEEHEKFVIEPPWPTMRDDLKAALEKMVVSHKPDHGIEGKLHEDSAYGFVKPLDATGLKEEEAGNLVYRKAIESLNENEVDRIRDIQLRTIVRDHVNVEKTKGVALADALRQLQAPSDDYPQFKHGLRHVRILKKEKGDYLVPIANRASGVAYKAYSAGENFCVEVFETAGGKWDGEAVRRFDANKKNAGPKIAHAPQWRDANEGAKLVMRIHKGDLIRLDHEGRARIMVVHRLDAAAGRFKLADHNETGNLDKRHATNNDIDPFRWLMASYNTLKKLAAVPVRVDELGRVWRVMPN

SEQ ID NO: 335 - protein, 1498 aa, Odoribacter laneus
METTLGIDLGTNSIGLALVDQEEHQILYSGVRIFPEGINKDTIGLGEKEESRNATRRAKRQMRRQYFRKKLRKAKLLELLIAYDMCPLKPEDVRRWKNWDKQQKSTVRQFPDTPAFREWLKQNPYELRKQAVTEDVTRPELGRILYQMIQRRGFLSSRKGKEEGKIFTGKDRMVGIDETRKNLQKQTLGAYLYDIAPKNGEKYRFRTERVRARYTLRDMYIREFEIIWQRQAGHLGLAHEQATRKKNIFLEGSATNVRNSKLITHLQAKYGRGHVLIEDTRITVTFQLPLKEVLGGKIEIEEEQLKFKSNESVLFWQRPLRSQKSLLSKCVFEGRNFYDPVHQKWIIAGPTPAPLSHPEFEEFRAYQFINNIIYGKNEHLTAIQREAVFELMCTESKDFNFEKIPKHLKLFEKFNFDDTTKVPACTTISQLRKLFPHPVWEEKREEIWHCFYFYDDNTLLFEKLQKDYALQTNDLEKIKKIRLSESYGNVSLKAIRRINPYLKKGYAYSTAVLLGGIRNSFGKRFEYFKEYEPEIEKAVCRILKEKNAEGEVIRKIKDYLVHNRFGFAKNDRAFQKLYHHSQAITTQAQKERLPETGNLRNPIVQQGLNELRRTVNKLLATCREKYGPSFKFDHIHVEMGRELRSSKTEREKQSRQIRENEKKNEAAKVKLAEYGLKAYRDNIQKYLLYKEIEEKGGTVCCPYTGKTLNISHTLGSDNSVQIEHIIPYSISLDDSLANKTLCDATFNREKGELTPYDFYQKDPSPEKWGASSWEEIEDRAFRLLPYAKAQRFIRRKPQESNEFISRQLNDTRYISKKAVEYLSAICSDVKAFPGQLTAELRHLWGLNNILQSAPDITFPLPVSATENHREYYVITNEQNEVIRLFPKQGETPRTEKGELLLTGEVERKVFRCKGMQEFQTDVSDGKYWRRIKLSSSVTWSPLFAPKPISADGQIVLKGRIEKGVFVCNQLKQKLKTGLPDGSYWISLPVISQTFKEGESVNNSKLTSQQVQLFGRVREGIFRCHNYQCPASGADGNFWCTLDTDTAQPAFTPIKNAPPGVGGGQIILTGDVDDKGIFHADDDLHYELPASLPKGKYYGIFTVESCDPTLIPIELSAPKTSKGENLIEGNIWVDEHTGEVRFDPKKNREDQRHHAIDAIVIALSSQSLFQRLSTYNARRENKKRGLDSTEHFPSPWPGFAQDVRQSVVPLLVSYKQNPKTLCKISKTLYKDGKKIHSCGNAVRGQLHKETVYGQRTAPGATEKSYHIRKDIRELKTSKHIGKVVDITIRQMLLKHLQENYHIDITQEFNIPSNAFFKEGVYRIFLPNKHGEPVPIKKIRMKEELGNAERLKDNINQYVNPRNNHHVMIYQDADGNLKEEIVSFWSVIERQNQGQPIYQLPREGRNIVSILQINDTFLIGLKEEEPEVYRNDLSTLSKHLYRVQKLSGMYYTFRHHLASTLNNEREEFRIQSLEAWKRANPVKVQIDEIGRITFLNGPLC

SEQ ID NO: 336 - protein, 1372 aa, Legionella pneumophila
MESSQILSPIGIDLGGKFTGVCLSHLEAFAELPNHANTKYSVILIDHNNFQLSQAQRRATRHRVRNKKRNQFVKRVALQLFQHILSRDLNAKEETALCHYLNNRGYTYVDTDLDEYIKDETTINLLKELLPSESEHNFIDWFLQKMQSSEFRKILVSKVEEKKDDKELKNAVKNIKNFITGFEKNSVEGHRHRKVYFENIKSDITKDNQLDSIKKKIPSVCLSNLLGHLSNLQWKNLHRYLAKNPKQFDEQTFGNEFLRMLKNFRHLKGSQESLAVRNLIQQLEQSQDYISILEKTPPEITIPPYEARTNTGMEKDQSLLLNPEKLNNLYPNWRNLIPGIIDAHPFLEKDLEHTKLRDRKRIISPSKQDEKRDSYILQRYLDLNKKIDKFKIKKQLSFLGQGKQLPANLIETQKEMETHFNSSLVSVLIQIASAYNKEREDAAQGIWFDNAFSLCELSNINPPRKQKILPLLVGAILSEDFINNKDKWAKFKIFWNTHKIGRTSLKSKCKEIEEARKNSGNAFKIDYEEALNHPEHSNNKALIKIIQTIPDIIQAIQSHLGHNDSQALIYHNPFSLSQLYTILETKRDGFHKNCVAVTCENYWRSQKTEIDPEISYASRLPADSVRPFDGVLARMMQRLAYEIAMAKWEQIKHIPDNSSLLIPIYLEQNRFEFEESFKKIKGSSSDKTLEQAIEKQNIQWEEKFQRIINASMNICPYKGASIGGQGEIDHIYPRSLSKKHFGVIFNSEVNLIYCSSQGNREKKEEHYLLEHLSPLYLKHQFGTDNVSDIKNFISQNVANIKKYISFHLLTPEQQKAARHALFLDYDDEAFKTITKFLMSQQKARVNGTQKFLGKQIMEFLSTLADSKQLQLEFSIKQITAEEVHDHRELLSKQEPKLVKSRQQSFPSHAIDATLTMSIGLKEFPQFSQELDNSWFINHLMPDEVHLNPVRSKEKYNKPNISSTPLFKDSLYAERFIPVWVKGETFAIGFSEKDLFEIKPSNKEKLFTLLKTYSTKNPGESLQELQAKSKAKWLYFPINKTLALEFLHHYFHKEIVTPDDTTVCHFINSLRYYTKKESITVKILKEPMPVLSVKFESSKKNVLGSFKHTIALPATKDWERLFNHPNFLALKANPAPNPKEFNEFIRKYFLSDNNPNSDIPNNGHNIKPQKHKAVRKVFSLPVIPGNAGTMMRIRRKDNKGQPLYQLQTIDDTPSMGIQINEDRLVKQEVLMDAYKTRNLSTIDGINNSEGQAYATFDNWLTLPVSTFKPEIIKLEMKPHSKTRRYIRITQSLADFIKTIDEALMIKPSDSIDDPLNMPNEIVCKNKLFGNELKPRDGKMKIVSTGKIVTYEFESDSTPQWIQTLYVTQLKKQP

SEQ ID NO: 337 - protein, 1517 aa, Bacteroides sp. 20_3
MKKIVGLDLGTNSIGWALINAYINKEHLYGIEACGSRIIPMDAAILGNFDKGNSISQTADRTSYRGIRRLRERHLLRRERLHRILDLLGFLPKHYSDSLNRYGKFLNDIECKLPWVKDETGSYKFIFQESFKEMLANFTEHHPILIANNKKVPYDWTIYYLRKKALTQKISKEELAWILLNFNQKRGYYQLRGEEEETPNKLVEYYSLKVEKVEDSGERKGKDTWYNVHLENGMIYRRTSNIPLDWEGKTKEFIVTTDLEADGSPKKDKEGNIKRSFRAPKDDDWTLIKKKTEADIDKIKMTVGAYIYDTLLQKPDQKIRGKLVRTIERKYYKNELYQILKTQSEFHEELRDKQLYIACLNELYPNNEPRRNSISTRDFCHLFIEDIIFYQRPLKSKKSLIDNCPYEENRYIDKESGEIKHASIKCIAKSHPLYQEFRLWQFIVNLRIYRKETDVDVTQELLPTEADYVTLFEWLNEKKEIDQKAFFKYPPFGFKKTTSNYRWNYVEDKPYPCNETHAQIIARLGKAHIPKAFLSKEKEETLWHILYSIEDKQEIEKALHSFANKNNLSEEFIEQFKNFPPFKKEYGSYSAKAIKKLLPLMRMGKYWSIENIDNGTRIRINKIIDGEYDENIRERVRQKAINLTDITHFRALPLWLACYLVYDRHSEVKDIVKWKTPKDIDLYLKSFKQHSLRNPIVEQVITETLRTVRDIWQQVGHIDEIHIELGREMKNPADKRARMSQQMIKNENTNLRIKALLTEFLNPEFGIENVRPYSPSQQDLLRIYEEGVLNSILELPEDIGIILGKFNQTDTLKRPTRSEILRYKLWLEQKYRSPYTGEMIPLSKLFTPAYEIEHIIPQSRYFDDSLSNKVICESEINKLKDRSLGYEFIKNHHGEKVELAFDKPVEVLSVEAYEKLVHESYSHNRSKMKKLLMEDIPDQFIERQLNDSRYISKVVKSLLSNIVREENEQEAISKNVIPCTGGITDRLKKDWGINDVWNKIVLPRFIRLNELTESTRFTSINTNNTMIPSMPLELQKGFNKKRIDHRHHAMDAIIIACANRNIVNYLNNVSASKNTKITRRDLQTLLCHKDKTDNNGNYKWVIDKPWETFTQDTLTALQKITVSFKQNLRVINKTTNHYQHYENGKKIVSNQSKGDSWAIRKSMHKETVHGEVNLRMIKTVSFNEALKKPQAIVEMDLKKKILAMLELGYDTKRIKNYFEENKDTWQDINPSKIKVYYFTKETKDRYFAVRKPIDTSFDKKKIKESITDTGIQQIMLRHLETKDNDPTLAFSPDGIDEMNRNILILNKGKKHQPIYKVRVYEKAEKFTVGQKGNKRTKFVEAAKGTNLFFAIYETEEIDKDTKKVIRKRSYSTIPLNVVIERQKQGLSSAPEDENGNLPKYILSPNDLVYVPTQEEINKGEVVMPIDRDRIYKMVDSSGITANFIPASTANLIFALPKATAEIYCNGENCIQNEYGIGSPQSKNQKAITGEMVKEICFPIKVDRLGNIIQVGSCILTN

SEQ ID NO: 338 - protein, 1101 aa, Akkermansia muciniphila
MSRSLTFSFDIGYASIGWAVIASASHDDADPSVCGCGTVLFPKDDCQAFKRREYRRLRRNIRSRRVRIERIGRLLVQAQIITPEMKETSGHPAPFYLASEALKGHRTLAPIELWHVLRWYAHNRGYDNNASWSNSLSEDGGNGEDTERVKHAQDLMDKHGTATMAETICRELKLEEGKADAPMEVSTPAYKNLNTAFPRLIVEKEVRRILELSAPLIPGLTAEIIELIAQHHPLTTEQRGVLLQHGIKLARRYRGSLLFGQLIPRFDNRIISRCPVTWAQVYEAELKKGNSEQSARERAEKLSKVPTANCPEFYEYRMARILCNIRADGEPLSAEIRRELMNQARQEGKLTKASLEKAISSRLGKETETNVSNYFTLHPDSEEALYLNPAVEVLQRSGIGQILSPSVYRIAANRLRRGKSVTPNYLLNLLKSRGESGEALEKKIEKESKKKEADYADTPLKPKYATGRAPYARTVLKKVVEEILDGEDPTRPARGEAHPDGELKAHDGCLYCLLDTDSSVNQHQKERRLDTMTNNHLVRHRMLILDRLLKDLIQDFADGQKDRISRVCVEVGKELTTFSAMDSKKIQRELTLRQKSHTDAVNRLKRKLPGKALSANLIRKCRIAMDMNWTCPFTGATYGDHELENLELEHIVPHSFRQSNALSSLVLTWPGVNRMKGQRTGYDFVEQEQENPVPDKPNLHICSLNNYRELVEKLDDKKGHEDDRRRKKKRKALLMVRGLSHKHQSQNHEAMKEIGMTEGMMTQSSHLMKLACKSIKTSLPDAHIDMIPGAVTAEVRKAWDVFGVFKELCPEAADPDSGKILKENLRSLTHLHHALDACVLGLIPYIIPAHHNGLLRRVLAMRRIPEKLIPQVRPVANQRHYVLNDDGRMMLRDLSASLKENIREQLMEQRVIQHVPADMGGALLKETMQRVLSVDGSGEDAMVSLSKKKDGKKEKNQVKASKLVGVFPEGPSKLKALKAAIEIDGNYGVALDPKPVVIRHIKVFKRIMALKEQNGGKPVRILKKGMLIHLTSSKDPKHAGVWRIESIQDSKGGVKLDLQRAHCAVPKNKTHECNWREVDLISLLKKYQMKRYPTSYTGTPR

SEQ ID NO: 339 - protein, 1424 aa, Prevotella sp. C561
MTQKVLGLDLGTNSIGSAVRNLDLSDDLQWQLEFFSSDIFRSSVNKESNGREYSLAAQRSAHRRSRGLNEVRRRRLWATLNLLIKHGFCPMSSESLMRWCTYDKRKGLFREYPIDDKDFNAWILLDFNGDGRPDYSSPYQLRRELVTRQFDFEQPIERYKLGRALYHIAQHRGFKSSKGETLSQQETNSKPSSTDEIPDVAGAMKASEEKLSKGLSTYMKEHNLLTVGAAFAQLEDEGVRVRNNNDYRAIRSQFQHEIETIFKFQQGLSVESELYERLISEKKNVGTIFYKRPLRSQRGNVGKCTLERSKPRCAIGHPLFEKFRAWTLINNIKVRMSVDTLDEQLPMKLRLDLYNECFLAFVRTEFKFEDIRKYLEKRLGIHFSYNDKTINYKDSTSVAGCPITARFRKMLGEEWESFRVEGQKERQAHSKNNISFHRVSYSIEDIWHFCYDAEEPEAVLAFAQETLRLERKKAEELVRIWSAMPQGYAMLSQKAIRNINKILMLGLKYSDAVILAKVPELVDVSDEELLSIAKDYYLVEAQVNYDKRINSIVNGLIAKYKSVSEEYRFADHNYEYLLDESDEKDIIRQIENSLGARRWSLMDANEQTDILQKVRDRYQDFFRSHERKFVESPKLGESFENYLTKKFPMVEREQWKKLYHPSQITIYRPVSVGKDRSVLRLGNPDIGAIKNPTVLRVLNTLRRRVNQLLDDGVISPDETRVVVETARELNDANRKWALDTYNRIRHDENEKIKKILEEFYPKRDGISTDDIDKARYVIDQREVDYFTGSKTYNKDIKKYKFWLEQGGQCMYTGRTINLSNLFDPNAFDIEHTIPESLSFDSSDMNLTLCDAHYNRFIKKNHIPTDMPNYDKAITIDGKEYPAITSQLQRWVERVERLNRNVEYWKGQARRAQNKDRKDQCMREMHLWKMELEYWKKKLERFTVTEVTDGFKNSQLVDTRVITRHAVLYLKSIFPHVDVQRGDVTAKFRKILGIQSVDEKKDRSLHSHHAIDATTLTIIPVSAKRDRMLELFAKIEEINKMLSFSGSEDRTGLIQELEGLKNKLQMEVKVCRIGHNVSEIGTFINDNIIVNHHIKNQALTPVRRRLRKKGYIVGGVDNPRWQTGDALRGEIHKASYYGAITQFAKDDEGKVLMKEGRPQVNPTIKFVIRRELKYKKSAADSGFASWDDLGKAIVDKELFALMKGQFPAETSFKDACEQGIYMIKKGKNGMPDIKLHHIRHVRCEAPQSGLKIKEQTYKSEKEYKRYFYAAVGDLYAMCCYTNGKIREFRIYSLYDVSCHRKSDIEDIPEFITDKKGNRLMLDYKLRTGDMILLYKDNPAELYDLDNVNLSRRLYKINRFESQSNLVLMTHHLSTSKERGRSLGKTVDYQNLPESIRSSVKSLNFLIMGENRDFVIKNGKIIFNHR

SEQ ID NO: 340 - protein, 1409 aa, Wolinella succinogenes
MLVSPISVDLGGKNTGFFSFTDSLDNSQSGTVIYDESFVLSQVGRRSKRHSKRNNLRNKLVKRLFLLILQEHHGLSIDVLPDEIRGLFNKRGYTYAGFELDEKKKDALESDTLKEFLSEKLQSIDRDSDVEDFLNQIASNAESFKDYKKGFEAVFASATHSPNKKLELKDELKSEYGENAKELLAGLRVTKEILDEFDKQENQGNLPRAKYFEELGEYIATNEKVKSFFDSNSLKLTDMTKLIGNISNYQLKELRRYFNDKEMEKGDIWIPNKLHKITERFVRSWHPKNDADRQRRAELMKDLKSKEIMELLTTTEPVMTIPPYDDMNNRGAVKCQTLRLNEEYLDKHLPNWRDIAKRLNHGKFNDDLADSTVKGYSEDSTLLHRLLDTSKEIDIYELRGKKPNELLVKTLGQSDANRLYGFAQNYYELIRQKVRAGIWVPVKNKDDSLNLEDNSNMLKRCNHNPPHKKNQIHNLVAGILGVKLDEAKFAEFEKELWSAKVGNKKLSAYCKNIEELRKTHGNTFKIDIEELRKKDPAELSKEEKAKLRLTDDVILNEWSQKIANFFDIDDKHRQRFNNLFSMAQLHTVIDTPRSGFSSTCKRCTAENRFRSETAFYNDETGEFHKKATATCQRLPADTQRPFSGKIERYIDKLGYELAKIKAKELEGMEAKEIKVPIILEQNAFEYEESLRKSKTGSNDRVINSKKDRDGKKLAKAKENAEDRLKDKDKRIKAFSSGICPYCGDTIGDDGEIDHILPRSHTLKIYGTVFNPEGNLIYVHQKCNQAKADSIYKLSDIKAGVSAQWIEEQVANIKGYKTFSVLSAEQQKAFRYALFLQNDNEAYKKVVDWLRTDQSARVNGTQKYLAKKIQEKLTKMLPNKHLSFEFILADATEVSELRRQYARQNPLLAKAEKQAPSSHAIDAVMAFVARYQKVFKDGTPPNADEVAKLAMLDSWNPASNEPLTKGLSTNQKIEKMIKSGDYGQKNMREVFGKSIFGENAIGERYKPIVVQEGGYYIGYPATVKKGYELKNCKVVTSKNDIAKLEKIIKNQDLISLKENQYIKIFSINKQTISELSNRYFNMNYKNLVERDKEIVGLLEFIVENCRYYTKKVDVKFAPKYIHETKYPFYDDWRRFDEAWRYLQENQNKTSSKDRFVIDKSSLNEYYQPDKNEYKLDVDTQPIWDDFCRWYFLDRYKTANDKKSIRIKARKTFSLLAESGVQGKVFRAKRKIPTGYAYQALPMDNNVIAGDYANILLEANSKTLSLVPKSGISIEKQLDKKLDVIKKTDVRGLAIDNNSFFNADFDTHGIRLIVENTSVKVGNFPISAIDKSAKRMIFRALFEKEKGKRKKKTTISFKESGPVQDYLKVFLKKIVKIQLRTDGSISNIVVRKNAADFTLSFRSEHIQKLLK

SEQ ID NO: 341 - protein, 1146 aa, Alicyclobacillus hesperidum
MAYRLGLDIGITSVGWAVVALEKDESGLKPVRIQDLGVRIFDKAEDSKTGASLALPRREARSARRRTRRRRHRLWRVKRLLEQHGILSMEQIEALYAQRTSSPDVYALRVAGLDRCLIAEEIARVLIHIAHRRGFQSNRKSEIKDSDAGKLLKAVQENENLMQSKGYRTVAEMLVSEATKTDAEGKLVHGKKHGYVSNVRNKAGEYRHTVSRQAIVDEVRKIFAAQRALGNDVMSEELEDSYLKILCSQRNFDDGPGGDSPYGHGSVSPDGVRQSIYERMVGSCTFETGEKRAPRSSYSFERFQLLTKVVNLRIYRQQEDGGRYPCELTQTERARVIDCAYEQTKITYGKLRKLLDMKDTESFAGLTYGLNRSRNKTEDTVFVEMKFYHEVRKALQRAGVFIQDLSIETLDQIGWILSVWKSDDNRRKKLSTLGLSDNVIEELLPLNGSKFGHLSLKAIRKILPFLEDGYSYDVACELAGYQFQGKTEYVKQRLLPPLGEGEVTNPVVRRALSQAIKVVNAVIRKHGSPESIHIELARELSKNLDERRKIEKAQKENQKNNEQIKDEIREILGSAHVTGRDIVKYKLFKQQQEFCMYSGEKLDVTRLFEPGYAEVDHIIPYGISFDDSYDNKVLVKTEQNRQKGNRTPLEYLRDKPEQKAKFIALVESIPLSQKKKNHLLMDKRAIDLEQEGFRERNLSDTRYITRALMNHIQAWLLFDETASTRSKRVVCVNGAVTAYMRARWGLTKDRDAGDKHHAADAVVVACIGDSLIQRVTKYDKFKRNALADRNRYVQQVSKSEGITQYVDKETGEVFTWESFDERKFLPNEPLEPWPFFRDELLARLSDDPSKNIRAIGLLTYSETEQIDPIFVSRMPTRKVTGAAHKETIRSPRIVKVDDNKGTEIQVVVSKVALTELKLTKDGEIKDYFRPEDDPRLYNTLRERLVQFGGDAKAAFKEPVYKISKDGSVRTPVRKVKIQEKLTLGVPVHGGRGIAENGGMVRIDVFAKGGKYYFVPIYVADVLKRELPNRLATAHKPYSEWRVVDDSYQFKFSLYPNDAVMIKPSREVDITYKDRKEPVGCRIMYFVSANIASASISLRTHDNSGELEGLGIQGLEVFEKYVVGPLGDTHPVYKERRMPFRVERKMN

SEQ ID NO: 342 - protein, 1442 aa, Caenispirillum salinarum
MPVLSPLSPNAAQGRRRWSLALDIGEGSIGWAVAEVDAEGRVLQLTGTGVTLFPSAWSNENGTYVAHGAADRAVRGQQQRHDSRRRRLAGLARLCAPVLERSPEDLKDLTRTPPKADPRAIFFLRADAARRPLDGPELFRVLHHMAAHRGIRLAELQEVDPPPESDADDAAPAATEDEDGTRRAAADERAFRRLMAEHMHRHGTQPTCGEIMAGRLRETPAGAQPVTRARDGLRVGGGVAVPTRALIEQEFDAIRAIQAPRHPDLPWDSLRRLVLDQAPIAVPPATPCLFLEELRRRGETFQGRTITREAIDRGLTVDPLIQALRIRETVGNLRLHERITEPDGRQRYVPRAMPELGLSHGELTAPERDTLVRALMHDPDGLAAKDGRIPYTRLRKLIGYDNSPVCFAQERDTSGGGITVNPTDPLMARWIDGWVDLPLKARSLYVRDVVARGADSAALARLLAEGAHGVPPVAAAAVPAATAAILESDIMQPGRYSVCPWAAEAILDAWANAPTEGFYDVTRGLFGFAPGEIVLEDLRRARGALLAHLPRTMAAARTPNRAAQQRGPLPAYESVIPSQLITSLRRAHKGRAADWSAADPEERNPFLRTWTGNAATDHILNQVRKTANEVITKYGNRRGWDPLPSRITVELAREAKHGVIRRNEIAKENRENEGRRKKESAALDTFCQDNTVSWQAGGLPKERAALRLRLAQRQEFFCPYCAERPKLRATDLFSPAETEIDHVIERRMGGDGPDNLVLAHKDCNNAKGKKTPHEHAGDLLDSPALAALWQGWRKENADRLKGKGHKARTPREDKDFMDRVGWRFEEDARAKAEENQERRGRRMLHDTARATRLARLYLAAAVMPEDPAEIGAPPVETPPSPEDPTGYTAIYRTISRVQPVNGSVTHMLRQRLLQRDKNRDYQTHHAEDACLLLLAGPAVVQAFNTEAAQHGADAPDDRPVDLMPTSDAYHQQRRARALGRVPLATVDAALADIVMPESDRQDPETGRVHWRLTRAGRGLKRRIDDLTRNCVILSRPRRPSETGTPGALHNATHYGRREITVDGRTDTVVTQRMNARDLVALLDNAKIVPAARLDAAAPGDTILKEICTEIADRHDRVVDPEGTHARRWISARLAALVPAHAEAVARDIAELADLDALADADRTPEQEARRSALRQSPYLGRAISAKKADGRARAREQEILTRALLDPHWGPRGLRHLIMREARAPSLVRIRANKTDAFGRPVPDAAVWVKTDGNAVSQLWRLTSVVTDDGRRIPLPKPIEKRIEISNLEYARLNGLDEGAGVTGNNAPPRPLRQDIDRLTPLWRDHGTAPGGYLGTAVGELEDKARSALRGKAMRQTLTDAGITAEAGWRLDSEGAVCDLEVAKGDTVKKDGKTYKVGVITQGIFGMPVDAAGSAPRTPEDCEKFEEQYGIKPWKAKGIPLA

SEQ ID NO: 343 - protein, 1114 aa, Eubacterium rectale
MNYTEKEKLFMKYILALDIGIASVGWAILDKESETVIEAGSNIFPEASAADNQLRRDMRGAKRNNRRLKTRINDFIKLWENNNLSIPQFKSTEIVGLKVRAITEEITLDELYLILYSYLKHRGISYLEDALDDTVSGSSAYANGLKLNAKELETHYPCEIQQERLNTIGKYRGQSQIINENGEVLDLSNVFTIGAYRKEIQRVFEIQKKYHPELTDEFCDGYMLIFNRKRKYYEGPGNEKSRTDYGRFTTKLDANGNYITEDNIFEKLIGKCSVYPDELRAAAASYTAQEYNVLNDLNNLTINGRKLEENEKHEIVERIKSSNTINMRKIISDCMGENIDDFAGARIDKSGKEIFHKFEVYNKMRKALLEIGIDISNYSREELDEIGYIMTINTDKEAMMEAFQKSWIDLSDDVKQCLINMRKTNGALFNKWQSFSLKIMNELIPEMYAQPKEQMTLLTEMGVTKGTQEEFAGLKYIPVDVVSEDIFNPVVRRSVRISFKILNAVLKKYKALDTIVIEMPRDRNSEEQKKRINDSQKLNEKEMEYIEKKLAVTYGIKLSPSDFSSQKQLSLKLKLWNEQDGICLYSGKTIDPNDIINNPQLFEIDHIIPRSISFDDARSNKVLVYRSENQKKGNQTPYYYLTHSHSEWSFEQYKATVMNLSKKKEYAISRKKIQNLLYSEDITKMDVLKGFINRNINDTSYASRLVLNTIQNFFMANEADTKVKVIKGSYTHQMRCNLKLDKNRDESYSHHAVDAMLIGYSELGYEAYHKLQGEFIDFETGEILRKDMWDENMSDEVYADYLYGKKWANIRNEVVKAEKNVKYWHYVMRKSNRGLCNQTIRGTREYDGKQYKINKLDIRTKEGIKVFAKLAFSKKDSDRERLLVYLNDRRTFDDLCKIYEDYSDAANPFVQYEKETGDIIRKYSKKHNGPRIDKLKYKDGEVGACIDISHKYGFEKGSKKVILESLVPYRMDVYYKEENHSYYLVGVKQSDIKFEKGRNVIDEEAYARILVNEKMIQPGQSRADLENLGFKFKLSFYKNDIIEYEKDGKIYTERLVSRTMPKQRNYIETKPIDKAKFEKQNLVGLGKTKFIKKYRYDILGNKYSCSEEKFTSFC

SEQ ID NO: 344 - protein, 1314 aa, Mycoplasma synoviae
MLRLYCANNLVLNNVQNLWKYLLLLIFDKKIIFLFKIKVILIRRYMENNNKEKIVIGFDLGVASVGWSIVNAETKEVIDLGVRLFSEPEKADYRRAKRTTRRLLRRKKFKREKFHKLILKNAEIFGLQSRNEILNVYKDQSSKYRNILKLKINALKEEIKPSELVWILRDYLQNRGYFYKNEKLTDEFVSNSFPSKKLHEHYEKYGFFRGSVKLDNKLDNKKDKAKEKDEEEESDAKKESEELIFSNKQWINEIVKVFENQSYLTESFKEEYLKLFNYVRPFNKGPGSKNSRTAYGVFSTDIDPETNKFKDYSNIWDKTIGKCSLFEEEIRAPKNLPSALIFNLQNEICTIKNEFTEFKNWWLNAEQKSEILKFVFTELFNWKDKKYSDKKFNKNLQDKIKKYLLNFALENFNLNEEILKNRDLENDTVLGLKGVKYYEKSNATADAALEFSSLKPLYVFIKFLKEKKLDLNYLLGLENTEILYFLDSIYLAISYSSDLKERNEWFKKLLKELYPKIKNNNLEIIENVEDIFEITDQEKFESFSKTHSLSREAFNHIIPLLLSNNEGKNYESLKHSNEELKKRTEKAELKAQQNQKYLKDNFLKEALVPLSVKTSVLQAIKIFNQIIKNFGKKYEISQVVIEMARELTKPNLEKLLNNATNSNIKILKEKLDQTEKFDDFTKKKFIDKIENSVVFRNKLFLWFEQDRKDPYTQLDIKINEIEDETEIDHVIPYSKSADDSWFNKLLVKKSTNQLKKNKTVWEYYQNESDPEAKWNKFVAWAKRIYLVQKSDKESKDNSEKNSIFKNKKPNLKFKNITKKLFDPYKDLGFLARNLNDTRYATKVFRDQLNNYSKHHSKDDENKLFKVVCMNGSITSFLRKSMWRKNEEQVYRFNFWKKDRDQFFHHAVDASIIAIFSLLTKTLYNKLRVYESYDVQRREDGVYLINKETGEVKKADKDYWKDQHNFLKIRENAIEIKNVLNNVDFQNQVRYSRKANTKLNTQLFNETLYGVKEFENNFYKLEKVNLFSRKDLRKFILEDLNEESEKNKKNENGSRKRILTEKYIVDEILQILENEEFKDSKSDINALNKYMDSLPSKFSEFFSQDFINKCKKENSLILTFDAIKHNDPKKVIKIKNLKFFREDATLKNKQAVHKDSKNQIKSFYESYKCVGFIWLKNKNDLEESIFVPINSRVIHFGDKDKDIFDFDSYNKEKLLNEINLKRPENKKFNSINEIEFVKFVKPGALLLNFENQQIYYISTLESSSLRAKIKLLNKMDKGKAVSMKKITNPDEYKIIEHVNPLGINLNWTKKLENNN

SEQ ID NO: 345 - protein, 1197 aa, Porphyromonas sp. oral taxon 279 str. F0450
MLMSKHVLGLDLGVGSIGWCLIALDAQGDPAEILGMGSRVVPLNNATKAIEAFNAGAAFTASQERTARRTMRRGFARYQLRRYRLRRELEKVGMLPDAALIQLPLLELWELRERAATAGRRLTLPELGRVLCHINQKRGYRHVKSDAAAIVGDEGEKKKDSNSAYLAGIRANDEKLQAEHKTVGQYFAEQLRQNQSESPTGGISYRIKDQIFSRQCYIDEYDQIMAVQRVHYPDILTDEFIRMLRDEVIFMQRPLKSCKHLVSLCEFEKQERVMRVQQDDGKGGWQLVERRVKFGPKVAPKSSPLFQLCCIYEAVNNIRLTRPNGSPCDITPEERAKIVAHLQSSASLSFAALKKLLKEKALIADQLTSKSGLKGNSTRVALASALQPYPQYHHLLDMELETRMMTVQLTDEETGEVTEREVAVVTDSYVRKPLYRLWHILYSIEEREAMRRALITQLGMKEEDLDGGLLDQLYRLDFVKPGYGNKSAKFICKLLPQLQQGLGYSEACAAVGYRHSNSPTSEEITERTLLEKIPLLQRNELRQPLVEKILNQMINLVNALKAEYGIDEVRVELARELKMSREERERMARNNKDREERNKGVAAKIRECGLYPTKPRIQKYMLWKEAGRQCLYCGRSIEEEQCLREGGMEVEHIIPKSVLYDDSYGNKTCACRRCNKEKGNRTALEYIRAKGREAEYMKRINDLLKEKKISYSKHQRLRWLKEDIPSDFLERQLRLTQYISRQAMAILQQGIRRVSASEGGVTARLRSLWGYGKILHTLNLDRYDSMGETERVSREGEATEELHITNWSKRMDHRHHAIDALVVACTRQSYIQRLNRLSSEFGREDKKKEDQEAQEQQATETGRLSNLERWLTQRPHFSVRTVSDKVAEILISYRPGQRVVTRGRNIYRKKMADGREVSCVQRGVLVPRGELMEASFYGKILSQGRVRIVKRYPLHDLKGEVVDPHLRELITTYNQELKSREKGAPIPPLCLDKDKKQEVRSVRCYAKTLSLDKAIPMCFDEKGEPTAFVKSASNHHLALYRTPKGKLVESIVTFWDAVDRARYGIPLVITHPREVMEQVLQRGDIPEQVLSLLPPSDWVFVDSLQQDEMVVIGLSDEELQRALEAQNYRKISEHLYRVQKMSSSYYVFRYHLETSVADDKNTSGRIPKFHRVQSLKAYEERNIRKVRVDLLGRISLL

SEQ ID NO: 346 - protein, 1121 aa, Streptococcus thermophilus
MSDLVLGLDIGIGSVGVGILNKVTGEIIHKNSRIFPAAQAENNLVRRTNRQGRRLARRKKHRRVRLNRLFEESGLITDFTKISINLNPYQLRVKGLTDELSNEELFIALKNMVKHRGISYLDDASDDGNSSVGDYAQIVKENSKQLETKTPGQIQLERYQTYGQLRGDFTVEKDGKKHRLINVFPTSAYRSEALRILQTQQEFNPQITDEFINRYLEILTGKRKYYHGPGNEKSRTDYGRYRTSGETLDNIFGILIGKCTFYPDEFRAAKASYTAQEFNLLNDLNNLTVPTETKKLSKEQKNQIINYVKNEKAMGPAKLFKYIAKLLSCDVADIKGYRIDKSGKAEIHTFEAYRKMKTLETLDIEQMDRETLDKLAYVLTLNTEREGIQEALEHEFADGSFSQKQVDELVQFRKANSSIFGKGWHNFSVKLMMELIPELYETSEEQMTILTRLGKQKTTSSSNKTKYIDEKLLTEEIYNPVVAKSVRQAIKIVNAAIKEYGDFDNIVIEMARETNEDDEKKAIQKIQKANKDEKDAAMLKAANQYNGKAELPHSVFHGHKQLATKIRLWHQQGERCLYTGKTISIHDLINNSNQFEVDHILPLSITFDDSLANKVLVYATANQEKGQRTPYQALDSMDDAWSFRELKAFVRESKTLSNKKKEYLLTEEDISKFDVRKKFIERNLVDTRYASRVVLNALQEHFRAHKIDTKVSVVRGQFTSQLRRHWGIEKTRDTYHHHAVDALIIAASSQLNLWKKQKNTLVSYSEDQLLDIETGELISDDEYKESVFKAPYQHFVDTLKSKEFEDSILFSYQVDSKFNRKISDATIYATRQAKVGKDKADETYVLGKIKDIYTQDGYDAFMKIYKKDKSKFLMYRHDPQTFEKVIEPILENYPNKQINEKGKEVPCNPFLKYKEEHGYIRKYSKKGNGPEIKSLKYYDSKLGNHIDITPKDSNNKVVLQSVSPWRADVYFNKTTGKYEILGLKYADLQFEKGTGTYKISQEKYNDIKKKEGVDSDSEFKFTLYKNDLLLVKDTETKEQQLFRFLSRTMPKQKHYVELKPYDKQKFEGGEALIKVLGNVANSGQCKKGLGKSNISIYKVRTDVLGNQHIIKNEGDKPKLDF

SEQ ID NO: 347 - protein, 1152 aa, Roseburia inulinivorans
MNAEHGKEGLLIMEENFQYRIGLDIGITSVGWAVLQNNSQDEPVRITDLGVRIFDVAENPKNGDALAAPRRDARTTRRRLRRRRHRLERIKFLLQENGLIEMDSFMERYYKGNLPDVYQLRYEGLDRKLKDEELAQVLIHIAKHRGFRSTRKAETKEKEGGAVLKATTENQKIMQEKGYRTVGEMLYLDEAFHTECLWNEKGYVLTPRNRPDDYKHTILRSMLVEEVHAIFAAQRAHGNQKATEGLEEAYVEIMTSQRSFDMGPGLQPDGKPSPYAMEGFGDRVGKCTFEKDEYRAPKATYTAELFVALQKINHTKLIDEFGTGRFFSEEERKTIIGLLLSSKELKYGTIRKKLNIDPSLKFNSLNYSAKKEGETEEERVLDTEKAKFASMFWTYEYSKCLKDRTEEMPVGEKADLFDRIGEILTAYKNDDSRSSRLKELGLSGEEIDGLLDLSPAKYQRVSLKAMRKMQPYLEDGLIYDKACEAAGYDFRALNDGNKKHLLKGEEINAIVNDITNPVVKRSVSQTIKVINAIIQKYGSPQAVNIELAREMSKNFQDRTNLEKEMKKRQQENERAKQQIIELGKQNPTGQDILKYRLWNDQGGYCLYSGKKIPLEELFDGGYDIDHILPYSITFDDSYRNKVLVTAQENRQKGNRTPYEYFGADEKRWEDYEASVRLLVRDYKKQQKLLKKNFTEEERKEFKERNLNDTKYITRVVYNMIRQNLELEPFNHPEKKKQVWAVNGAVTSYLRKRWGLMQKDRSTDRHHAMDAVVIACCTDGMIHKISRYMQGRELAYSRNFKFPDEETGEILNRDNFTREQWDEKFGVKVPLPWNSFRDELDIRLLNEDPKNFLLTHADVQRELDYPGWMYGEEESPIEEGRYINYIRPLFVSRMPNHKVTGSAHDATIRSARDYETRGVVITKVPLTDLKLNKDNEIEGYYDKDSDRLLYQALVRQLLLHGNDGKKAFAEDFHKPKADGTEGPVVRKVKIEKKQTSGVMVRGGTGIAANGEMVRIDVFRENGKYYFVPVYTADVVRKVLPNRAATHTKPYSEWRVMDDANFVFSLYSRDLIHVKSKKDIKTNLVNGGLLLQKEIFAYYTGADIATASIAGFANDSNFKFRGLGIQSLEIFEKCQVDILGNISVVRHENRQEFH

SEQ ID NO: 348 - protein, 1082 aa, Methylosinus trichosporium
MRVLGLDAGIASLGWALIEIEESNRGELSQGTIIGAGTWMFDAPEEKTQAGAKLKSEQRRTFRGQRRVVRRRRQRMNEVRRILHSHGLLPSSDRDALKQPGLDPWRIRAEALDRLLGPVELAVALGHIARHRGFKSNSKGAKTNDPADDTSKMKRAVNETREKLARFGSAAKMLVEDESFVLRQTPTKNGASEIVRRFRNREGDYSRSLLRDDLAAEMRALFTAQARFQSAIATADLQTAFTKAAFFQRPLQDSEKLVGPCPFEVDEKRAPKRGYSFELFRFLSRLNHVTLRDGKQERTLTRDELALAAADFGAAAKVSFTALRKKLKLPETTVFVGVKADEESKLDVVARSGKAAEGTARLRSVIVDALGELAWGALLCSPEKLDKIAEVISFRSDIGRISEGLAQAGCNAPLVDALTAAASDGRFDPFTGAGHISSKAARNILSGLRQGMTYDKACCAADYDHTASRERGAFDVGGHGREALKRILQEERISRELVGSPTARKALIESIKQVKAIVERYGVPDRIHVELARDVGKSIEEREEITRGIEKRNRQKDKLRGLFEKEVGRPPQDGARGKEELLRFELWSEQMGRCLYTDDYISPSQLVATDDAVQVDHILPWSRFADDSYANKTLCMAKANQDKKGRTPYEWFKAEKTDTEWDAFIVRVEALADMKGFKKRNYKLRNAEEAAAKFRNRNLNDTRWACRLLAEALKQLYPKGEKDKDGKERRRVFSRPGALTDRLRRAWGLQWMKKSTKGDRIPDDRHHALDAIVIAATTESLLQRATREVQEIEDKGLHYDLVKNVTPPWPGFREQAVEAVEKVFVARAERRRARGKAHDATIRHIAVREGEQRVYERRKVAELKLADLDRVKDAERNARLIEKLRNWIEAGSPKDDPPLSPKGDPIFKVRLVTKSKVNIALDTGNPKRPGTVDRGEMARVDVFRKASKKGKYEYYLVPIYPHDIATMKTPPIRAVQAYKPEDEWPEMDSSYEFCWSLVPMTYLQVISSKGEIFEGYYRGMNRSVGAIQLSAHSNSSDVVQGIGARTLTEFKKFNVDRFGRKHEVERELRTWRGETWRGKAYI

SEQ ID NO: 349 - protein, 1156 aa, Ruminococcus albus
MGNYYLGLDVGIGSIGWAVINIEKKRIEDFNVRIFKSGEIQEKNRNSRASQQCRRSRGLRRLYRRKSHRKLRLKNYLSIIGLTTSEKIDYYYETADNNVIQLRNKGLSEKLTPEEIAACLIHICNNRGYKDFYEVNVEDIEDPDERNEYKEEHDSIVLISNLMNEGGYCTPAEMICNCREFDEPNSVYRKFHNSAASKNHYLITRHMLVKEVDLILENQSKYYGILDDKTIAKIKDIIFAQRDFEIGPGKNERFRRFTGYLDSIGKCQFFKDQERGSRFTVIADIYAFVNVLSQYTYTNNRGESVFDTSFANDLINSALKNGSMDKRELKAIAKSYHIDISDKNSDTSLTKCFKYIKVVKPLFEKYGYDWDKLIENYTDTDNNVLNRIGIVLSQAQTPKRRREKLKALNIGLDDGLINELTKLKLSGTANVSYKYMQGSIEAFCEGDLYGKYQAKFNKEIPDIDENAKPQKLPPFKNEDDCEFFKNPVVFRSINETRKLINAIIDKYGYPAAVNIETADELNKTFEDRAIDTKRNNDNQKENDRIVKEIIECIKCDEVHARHLIEKYKLWEAQEGKCLYSGETITKEDMLRDKDKLFEVDHIVPYSLILDNTINNKALVYAEENQKKGQRTPLMYMNEAQAADYRVRVNTMFKSKKCSKKKYQYLMLPDLNDQELLGGWRSRNLNDTRYICKYLVNYLRKNLRFDRSYESSDEDDLKIRDHYRVFPVKSRFTSMFRRWWLNEKTWGRYDKAELKKLTYLDHAADAIIIANCRPEYVVLAGEKLKLNKMYHQAGKRITPEYEQSKKACIDNLYKLFRMDRRTAEKLLSGHGRLTPIIPNLSEEVDKRLWDKNIYEQFWKDDKDKKSCEELYRENVASLYKGDPKFASSLSMPVISLKPDHKYRGTITGEEAIRVKEIDGKLIKLKRKSISEITAESINSIYTDDKILIDSLKTIFEQADYKDVGDYLKKTNQHFFTTSSGKRVNKVTVIEKVPSRWLRKEIDDNNFSLLNDSSYYCIELYKDSKGDNNLQGIAMSDIVHDRKTKKLYLKPDFNYPDDYYTHVMYIFPGDYLRIKSTSKKSGEQLKFEGYFISVKNVNENSFRFISDNKPCAKDKRVSITKKDIVIKLAVDLMGKVQGENNGKGISCGEPLSLLKEKN

SEQ ID NO: 350 - protein, 1187 aa, Bifidobacterium longum
MLSRQLLGASHLARPVSYSYNVQDNDVHCSYGERCFMRGKRYRIGIDVGLNSVGLAAVEVSDENSPVRLLNAQSVIHDGGVDPQKNKEAITRKNMSGVARRTRRMRRRKRERLHKLDMLLGKFGYPVIEPESLDKPFEEWHVRAELATRYIEDDELRRESISIALRHMARHRGWRNPYRQVDSLISDNPYSKQYGELKEKAKAYNDDATAAEEESTPAQLVVAMLDAGYAEAPRLRWRTGSKKPDAEGYLPVRLMQEDNANELKQIFRVQRVPADEWKPLFRSVFYAVSPKGSAEQRVGQDPLAPEQARALKASLAFQEYRIANVITNLRIKDASAELRKLTVDEKQSIYDQLVSPSSEDITWSDLCDFLGFKRSQLKGVGSLTEDGEERISSRPPRLTSVQRIYESDNKIRKPLVAWWKSASDNEHEAMIRLLSNTVDIDKVREDVAYASAIEFIDGLDDDALTKLDSVDLPSGRAAYSVETLQKLTRQMLTTDDDLHEARKTLFNVTDSWRPPADPIGEPLGNPSVDRVLKNVNRYLMNCQQRWGNPVSVNIEHVRSSFSSVAFARKDKREYEKNNEKRSIFRSSLSEQLRADEQMEKVRESDLRRLEAIQRQNGQCLYCGRTITFRTCEMDHIVPRKGVGSTNTRTNFAAVCAECNRMKSNTPFAIWARSEDAQTRGVSLAEAKKRVTMFTFNPKSYAPREVKAFKQAVIARLQQTEDDAAIDNRSIESVAWMADELHRRIDWYFNAKQYVNSASIDDAEAETMKTTVSVFQGRVTASARRAAGIEGKIHFIGQQSKTRLDRRHHAVDASVIAMMNTAAAQTLMERESLRESQRLIGLMPGERSWKEYPYEGTSRYESFHLWLDNMDVLLELLNDALDNDRIAVMQSQRYVLGNSIAHDATIHPLEKVPLGSAMSADLIRRASTPALWCALTRLPDYDEKEGLPEDSHREIRVHDTRYSADDEMGFFASQAAQIAVQEGSADIGSAIHHARVYRCWKTNAKGVRKYFYGMIRVFQTDLLRACHDDLFTVPLPPQSISMRYGEPRVVQALQSGNAQYLGSLVVGDEIEMDFSSLDVDGQIGEYLQFFSQFSGGNLAWKHWVVDGFFNQTQLRIRPRYLAAEGLAKAFSDDVVPDGVQKIVTKQGWLPPVNTASKTAVRIVRRNAFGEPRLSSAHHMPCSWQWRHE

SEQ ID NO: 351 - protein, 1150 aa, Enterococcus faecalis
MYSIGLDLGISSVGWSVIDERTGNVIDLGVRLFSAKNSEKNLERRTNRGGRRLIRRKTNRLKDAKKILAAVGFYEDKSLKNSCPYQLRVKGLTEPLSRGEIYKVTLHILKKRGISYLDEVDTEAAKESQDYKEQVRKNAQLLTKYTPGQIQLQRLKENNRVKTGINAQGNYQLNVFKVSAYANELATILKTQQAFYPNELTDDWIALFVQPGIAEEAGLIYRKRPYYHGPGNEANNSPYGRWSDFQKTGEPATNIFDKLIGKDFQGELRASGLSLSAQQYNLLNDLTNLKIDGEVPLSSEQKEYILTELMTKEFTRFGVNDVVKLLGVKKERLSGWRLDKKGKPEIHTLKGYRNWRKIFAEAGIDLATLPTETIDCLAKVLTLNTEREGIENTLAFELPELSESVKLLVLDRYKELSQSISTQSWHRFSLKTLHLLIPELMNATSEQNTLLEQFQLKSDVRKRYSEYKKLPTKDVLAEIYNPTVNKTVSQAFKVIDALLVKYGKEQIRYITIEMPRDDNEEDEKKRIKELHAKNSQRKNDSQSYFMQKSGWSQEKFQTTIQKNRRFLAKLLYYYEQDGICAYTGLPISPELLVSDSTEIDHIIPISISLDDSINNKVLVLSKANQVKGQQTPYDAWMDGSFKKINGKFSNWDDYQKWVESRHFSHKKENNLLETRNIFDSEQVEKFLARNLNDTRYASRLVLNTLQSFFTNQETKVRVVNGSFTHTLRKKWGADLDKTRETHHHHAVDATLCAVTSFVKVSRYHYAVKEETGEKVMREIDFETGEIVNEMSYWEFKKSKKYERKTYQVKWPNFREQLKPVNLHPRIKFSHQVDRKANRKLSDATIYSVREKTEVKTLKSGKQKITTDEYTIGKIKDIYTLDGWEAFKKKQDKLLMKDLDEKTYERLLSIAETTPDFQEVEEKNGKVKRVKRSPFAVYCEENDIPAIQKYAKKNNGPLIRSLKYYDGKLNKHINITKDSQGRPVEKTKNGRKVTLQSLKPYRYDIYQDLETKAYYTVQLYYSDLRFVEGKYGITEKEYMKKVAEQTKGQVVRFCFSLQKNDGLEIEWKDSQRYDVRFYNFQSANSINFKGLEQEMMPAENQFKQKPYNNGAINLNIAKYGKEGKKLRKFNTDILGKKHYLFYEKEPKNIIK

SEQ ID NO: 352 - protein, 1236 aa, Mycoplasma mobile
MYFYKNKENKLNKKVVLGLDLGIASVGWCLTDISQKEDNKFPIILHGVRLFETVDDSDDKLLNETRRKKRGQRRRNRRLFTRKRDFIKYLIDNNIIELEFDKNPKILVRNFIEKYINPFSKNLELKYKSVTNLPIGFHNLRKAAINEKYKLDKSELIVLLYFYLSLRGAFFDNPEDTKSKEMNKNEIEIFDKNESIKNAEFPIDKIIEFYKISGKIRSTINLKFGHQDYLKEIKQVFEKQNIDFMNYEKFAMEEKSFFSRIRNYSEGPGNEKSFSKYGLYANENGNPELIINEKGQKIYTKIFKTLWESKIGKCSYDKKLYRAPKNSFSAKVFDITNKLTDWKHKNEYISERLKRKILLSRFLNKDSKSAVEKILKEENIKFENLSEIAYNKDDNKINLPIINAYHSLTTIFKKHLINFENYLISNENDLSKLMSFYKQQSEKLFVPNEKGSYEINQNNNVLHIFDAISNILNKFSTIQDRIRILEGYFEFSNLKKDVKSSEIYSEIAKLREFSGTSSLSFGAYYKFIPNLISEGSKNYSTISYEEKALQNQKNNFSHSNLFEKTWVEDLIASPTVKRSLRQTMNLLKEIFKYSEKNNLEIEKIVVEVTRSSNNKHERKKIEGINKYRKEKYEELKKVYDLPNENTTLLKKLWLLRQQQGYDAYSLRKIEANDVINKPWNYDIDHIVPRSISFDDSFSNLVIVNKLDNAKKSNDLSAKQFIEKIYGIEKLKEAKENWGNWYLRNANGKAFNDKGKFIKLYTIDNLDEFDNSDFINRNLSDTSYITNALVNHLTFSNSKYKYSVVSVNGKQTSNLRNQIAFVGIKNNKETEREWKRPEGFKSINSNDFLIREEGKNDVKDDVLIKDRSFNGHHAEDAYFITIISQYFRSFKRIERLNVNYRKETRELDDLEKNNIKFKEKASFDNFLLINALDELNEKLNQMRFSRMVITKKNTQLFNETLYSGKYDKGKNTIKKVEKLNLLDNRTDKIKKIEEFFDEDKLKENELTKLHIFNHDKNLYETLKIIWNEVKIEIKNKNLNEKNYFKYFVNKKLQEGKISFNEWVPILDNDFKIIRKIRYIKFSSEEKETDEIIFSQSNFLKIDQRQNFSFHNTLYWVQIWVYKNQKDQYCFISIDARNSKFEKDEIKINYEKLKTQKEKLQIINEEPILKINKGDLFENEEKELFYIVGRDEKPQKLEIKYILGKKIKDQKQIQKPVKKYFPNWKKVNLTYMGEIFKK

SEQ ID NO: 353 - protein, 1105 aa, Actinomyces coleocanis
MDNKNYRIGIDVGLNSIGFCAVEVDQHDTPLGFLNLSVYRHDAGIDPNGKKTNTTRLAMSGVARRTRRLFRKRKRRLAALDRFIEAQGWTLPDHADYKDPYTPWLVRAELAQTPIRDENDLHEKLAIAVRHIARHRGWRSPWVPVRSLHVEQPPSDQYLALKERVEAKTLLQMPEGATPAEMVVALDLSVDVNLRPKNREKTDTRPENKKPGFLGGKLMQSDNANELRKIAKIQGLDDALLRELIELVFAADSPKGASGELVGYDVLPGQHGKRRAEKAHPAFQRYRIASIVSNLRIRHLGSGADERLDVETQKRVFEYLLNAKPTADITWSDVAEEIGVERNLLMGTATQTADGERASAKPPVDVTNVAFATCKIKPLKEWWLNADYEARCVMVSALSHAEKLTEGTAAEVEVAEFLQNLSDEDNEKLDSFSLPIGRAAYSVDSLERLTKRMIENGEDLFEARVNEFGVSEDWRPPAEPIGARVGNPAVDRVLKAVNRYLMAAEAEWGAPLSVNIEHVREGFISKRQAVEIDRENQKRYQRNQAVRSQIADHINATSGVRGSDVTRYLAIQRQNGECLYCGTAITFVNSEMDHIVPRAGLGSTNTRDNLVATCERCNKSKSNKPFAVWAAECGIPGVSVAEALKRVDFWIADGFASSKEHRELQKGVKDRLKRKVSDPEIDNRSMESVAWMARELAHRVQYYFDEKHTGTKVRVFRGSLTSAARKASGFESRVNFIGGNGKTRLDRRHHAMDAATVAMLRNSVAKTLVLRGNIRASERAIGAAETWKSFRGENVADRQIFESWSENMRVLVEKFNLALYNDEVSIFSSLRLQLGNGKAHDDTITKLQMHKVGDAWSLTEIDRASTPALWCALTRQPDFTWKDGLPANEDRTIIVNGTHYGPLDKVGIFGKAAASLLVRGGSVDIGSAIHHARIYRIAGKKPTYGMVRVFAPDLLRYRNEDLFNVELPPQSVSMRYAEPKVREAIREGKAEYLGWLVVGDELLLDLSSETSGQIAELQQDFPGTTHWTVAGFFSPSRLRLRPVYLAQEGLGEDVSEGSKSIIAGQGWRPAVNKVFGSAMPEVIRRDGLGRKRRFSYSGLPVSWQG

SEQ ID NO: 354 - protein, 1079 aa, Dinoroseobacter shibae
MRLGLDIGTSSIGWWLYETDGAGSDARITGVVDGGVRIFSDGRDPKSGASLAVDRRAARAMRRRRDRYLRRRATLMKVLAETGLMPADPAEAKALEALDPFALRAAGLDEPLPLPHLGRALFHLNQRRGFKSNRKTDRGDNESGKIKDATARLDMEMMANGARTYGEFLHKRRQKATDPRHVPSVRTRLSIANRGGPDGKEEAGYDFYPDRRHLEEEFHKLWAAQGAHHPELTETLRDLLFEKIFFQRPLKEPEVGLCLFSGHHGVPPKDPRLPKAHPLTQRRVLYETVNQLRVTADGREARPLTREERDQVIHALDNKKPTKSLSSMVLKLPALAKVLKLRDGERFTLETGVRDAIACDPLRASPAHPDRFGPRWSILDADAQWEVISRIRRVQSDAEHAALVDWLTEAHGLDRAHAEATAHAPLPDGYGRLGLTATTRILYQLTADVVTYADAVKACGWHHSDGRTGECFDRLPYYGEVLERHVIPGSYHPDDDDITRFGRITNPTVHIGLNQLRRLVNRIIETHGKPHQIVVELARDLKKSEEQKRADIKRIRDTTEAAKKRSEKLEELEIEDNGRNRMLLRLWEDLNPDDAMRRFCPYTGTRISAAMIFDGSCDVDHILPYSRTLDDSFPNRTLCLREANRQKRNQTPWQAWGDTPHWHAIAANLKNLPENKRWRFAPDAMTRFEGENGFLDRALKDTQYLARISRSYLDTLFTKGGHVWVVPGRFTEMLRRHWGLNSLLSDAGRGAVKAKNRTDHRHHAIDAAVIAATDPGLLNRISRAAGQGEAAGQSAELIARDTPPPWEGFRDDLRVRLDRIIVSHRADHGRIDHAARKQGRDSTAGQLHQETAYSIVDDIHVASRTDLLSLKPAQLLDEPGRSGQVRDPQLRKALRVATGGKTGKDFENALRYFASKPGPYQAIRRVRIIKPLQAQARVPVPAQDPIKAYQGGSNHLFEIWRLPDGEIEAQVITSFEAHTLEGEKRPHPAAKRLLRVHKGDMVALERDGRRVVGHVQKMDIANGLFIVPHNEANADTRNNDKSDPFKWIQIGARPAIASGIRRVSVDEIGRLRDGGTRPI

SEQ ID NO: 355 - protein, 1181 aa, Actinomyces sp. oral taxon 180 str. F0310
MLHCIAVIRVPPSEEPGFFETHADSCALCHHGCMTYAANDKAIRYRVGIDVGLRSIGFCAVEVDDEDHPIRILNSVVHVHDAGTGGPGETESLRKRSGVAARARRRGRAEKQRLKKLDVLLEELGWGVSSNELLDSHAPWHIRKRLVSEYIEDETERRQCLSVAMAHIARHRGWRNSFSKVDTLLLEQAPSDRMQGLKERVEDRTGLQFSEEVTQGELVATLLEHDGDVTIRGFVRKGGKATKVHGVLEGKYMQSDLVAELRQICRTQRVSETTFEKLVLSIFHSKEPAPSAARQRERVGLDELQLALDPAAKQPRAERAHPAFQKFKVVATLANMRIREQSAGERSLTSEELNRVARYLLNHTESESPTWDDVARKLEVPRHRLRGSSRASLETGGGLTYPPVDDTTVRVMSAEVDWLADWWDCANDESRGHMIDAISNGCGSEPDDVEDEEVNELISSATAEDMLKLELLAKKLPSGRVAYSLKTLREVTAAILETGDDLSQAITRLYGVDPGWVPTPAPIEAPVGNPSVDRVLKQVARWLKFASKRWGVPQTVNIEHTREGLKSASLLEEERERWERFEARREIRQKEMYKRLGISGPFRRSDQVRYEILDLQDCACLYCGNEINFQTFEVDHIIPRVDASSDSRRTNLAAVCHSCNSAKGGLAFGQWVKRGDCPSGVSLENAIKRVRSWSKDRLGLTEKAMGKRKSEVISRLKTEMPYEEFDGRSMESVAWMAIELKKRIEGYFNSDRPEGCAAVQVNAYSGRLTACARRAAHVDKRVRLIRLKGDDGHHKNRFDRRNHAMDALVIALMTPAIARTIAVREDRREAQQLTRAFESWKNFLGSEERMQDRWESWIGDVEYACDRLNELIDADKIPVTENLRLRNSGKLHADQPESLKKARRGSKRPRPQRYVLGDALPADVINRVTDPGLWTALVRAPGFDSQLGLPADLNRGLKLRGKRISADFPIDYFPTDSPALAVQGGYVGLEFHHARLYRIIGPKEKVKYALLRVCAIDLCGIDCDDLFEVELKPSSISMRTADAKLKEAMGNGSAKQIGWLVLGDEIQIDPTKFPKQSIGKFLKECGPVSSWRVSALDTPSKITLKPRLLSNEPLLKTSRVGGHESDLVVAECVEKIMKKTGWVVEINALCQSGLIRVIRRNALGEVRTSPKSGLPISLNLR

SEQ ID NO: 356 - protein, 1113 aa, Alcanivorax sp. W11-5
MRYRVGLDLGTASVGAAVFSMDEQGNPMELIWHYERLFSEPLVPDMGQLKPKKAARRLARQQRRQIDRRASRLRRIAIVSRRLGIAPGRNDSGVHGNDVPTLRAMAVNERIELGQLRAVLLRMGKKRGYGGTFKAVRKVGEAGEVASGASRLEEEMVALASVQNKDSVTVGEYLAARVEHGLPSKLKVAANNEYYAPEYALFRQYLGLPAIKGRPDCLPNMYALRHQIEHEFERIWATQSQFHDVMKDHGVKEEIRNAIFFQRPLKSPADKVGRCSLQTNLPRAPRAQIAAQNFRIEKQMADLRWGMGRRAEMLNDHQKAVIRELLNQQKELSFRKIYKELERAGCPGPEGKGLNMDRAALGGRDDLSGNTTLAAWRKLGLEDRWQELDEVTQIQVINFLADLGSPEQLDTDDWSCRFMGKNGRPRNFSDEFVAFMNELRMTDGFDRLSKMGFEGGRSSYSIKALKALTEWMIAPHWRETPETHRVDEEAAIRECYPESLATPAQGGRQSKLEPPPLTGNEVVDVALRQVRHTINMMIDDLGSVPAQIVVEMAREMKGGVTRRNDIEKQNKRFASERKKAAQSIEENGKTPTPARILRYQLWIEQGHQCPYCESNISLEQALSGAYTNFEHILPRTLTQIGRKRSELVLAHRECNDEKGNRTPYQAFGHDDRRWRIVEQRANALPKKSSRKTRLLLLKDFEGEALTDESIDEFADRQLHESSWLAKVTTQWLSSLGSDVYVSRGSLTAELRRRWGLDTVIPQVRFESGMPVVDEEGAEITPEEFEKFRLQWEGHRVTREMRTDRRPDKRIDHRHHLVDAIVTALTSRSLYQQYAKAWKVADEKQRHGRVDVKVELPMPILTIRDIALEAVRSVRISHKPDRYPDGRFFEATAYGIAQRLDERSGEKVDWLVSRKSLTDLAPEKKSIDVDKVRANISRIVGEAIRLHISNIFEKRVSKGMTPQQALREPIEFQGNILRKVRCFYSKADDCVRIEHSSRRGHHYKMLLNDGFAYMEVPCKEGILYGVPNLVRPSEAVGIKRAPESGDFIRFYKGDTVKNIKTGRVYTIKQILGDGGGKLILTPVTETKPADLLSAKWGRLKVGGRNIHLLRLCAE

SEQ ID NO: 357 - protein, 1052 aa, Aminomonas paucivorans
MIGEHVRGGCLFDDHWTPNWGAFRLPNTVRTFTKAENPKDGSSLAEPRRQARGLRRRLRRKTQRLEDLRRLLAKEGVLSLSDLETLFRETPAKDPYQLRAEGLDRPLSFPEWVRVLYHITKHRGFQSNRRNPVEDGQERSRQEEEGKLLSGVGENERLLREGGYRTAGEMLARDPKFQDHRRNRAGDYSHTLSRSLLLEEARRLFQSQRTLGNPHASSNLEEAFLHLVAFQNPFASGEDIRNKAGHCSLEPDQIRAPRRSASAETFMLLQKTGNLRLIHRRTGEERPLTDKEREQIHLLAWKQEKVTHKTLRRHLEIPEEWLFTGLPYHRSGDKAEEKLFVHLAGIHEIRKALDKGPDPAVWDTLRSRRDLLDSIADTLTFYKNEDEILPRLESLGLSPENARALAPLSFSGTAHLSLSALGKLLPHLEEGKSYTQARADAGYAAPPPDRHPKLPPLEEADWRNPVVFRALTQTRKVVNALVRRYGPPWCIHLETARELSQPAKVRRRIETEQQANEKKKQQAEREFLDIVGTAPGPGDLLKMRLWREQGGFCPYCEEYLNPTRLAEPGYAEMDHILPYSRSLDNGWHNRVLVHGKDNRDKGNRTPFEAFGGDTARWDRLVAWVQASHLSAPKKRNLLREDFGEEAERELKDRNLTDTRFITKTAATLLRDRLTFHPEAPKDPVMTLNGRLTAFLRKQWGLHKNRKNGDLHHALDAAVLAVASRSFVYRLSSHNAAWGELPRGREAENGFSLPYPAFRSEVLARLCPTREEILLRLDQGGVGYDEAFRNGLRPVFVSRAPSRRLRGKAHMETLRSPKWKDHPEGPRTASRIPLKDLNLEKLERMVGKDRDRKLYEALRERLAAFGGNGKKAFVAPFRKPCRSGEGPLVRSLRIFDSGYSGVELRDGGEVYAVADHESMVRVDVYAKKNRFYLVPVYVADVARGIVKNRAIVAHKSEEEWDLVDGSFDFRFSLFPGDLVEIEKKDGAYLGYYKSCHRGDGRLLLDRHDRMPRESDCGTFYVSTRKDVLSMSKYQVDPLGEIRLVGSEKPPFVL

SEQ ID NO: 358 - protein, 1233 aa, Mycoplasma canis
MEKKRKVTLGFDLGIASVGWAIVDSETNQVYKLGSRLFDAPDTNLERRTQRGTRRLLRRRKYRNQKFYNLVKRTEVFGLSSREAIENRFRELSIKYPNIIELKTKALSQEVCPDEIAWILHDYLKNRGYFYDEKETKEDFDQQTVESMPSYKLNEFYKKYGYFKGALSQPTESEMKDNKDLKEAFFFDFSNKEWLKEINYFFNVQKNILSETFIEEFKKIFSFTRDISKGPGSDNMPSPYGIFGEFGDNGQGGRYEHIWDKNIGKCSIFTNEQRAPKYLPSALIFNFLNELANIRLYSTDKKNIQPLWKLSSVDKLNILLNLFNLPISEKKKKLTSTNINDIVKKESIKSIMISVEDIDMIKDEWAGKEPNVYGVGLSGLNIEESAKENKFKFQDLKILNVLINLLDNVGIKFEFKDRNDIIKNLELLDNLYLFLIYQKESNNKDSSIDLFIAKNESLNIENLKLKLKEFLLGAGNEFENHNSKTHSLSKKAIDEILPKLLDNNEGWNLEAIKNYDEEIKSQIEDNSSLMAKQDKKYLNDNFLKDAILPPNVKVTFQQAILIFNKIIQKFSKDFEIDKVVIELAREMTQDQENDALKGIAKAQKSKKSLVEERLEANNIDKSVFNDKYEKLIYKIFLWISQDFKDPYTGAQISVNEIVNNKVEIDHIIPYSLCFDDSSANKVLVHKQSNQEKSNSLPYEYIKQGHSGWNWDEFTKYVKRVFVNNVDSILSKKERLKKSENLLTASYDGYDKLGFLARNLNDTRYATILFRDQLNNYAEHHLIDNKKMFKVIAMNGAVTSFIRKNMSYDNKLRLKDRSDFSHHAYDAAIIALFSNKTKTLYNLIDPSLNGIISKRSEGYWVIEDRYTGEIKELKKEDWTSIKNNVQARKIAKEIEEYLIDLDDEVFFSRKTKRKTNRQLYNETIYGIATKTDEDGITNYYKKEKFSILDDKDIYLRLLREREKFVINQSNPEVIDQIIEIIESYGKENNIPSRDEAINIKYTKNKINYNLYLKQYMRSLTKSLDQFSEEFINQMIANKTFVLYNPTKNTTRKIKFLRLVNDVKINDIRKNQVINKFNGKNNEPKAFYENINSLGAIVFKNSANNFKTLSINTQIAIFGDKNWDIEDFKTYNMEKIEKYKEIYGIDKTYNFHSFIFPGTILLDKQNKEFYYISSIQTVRDIIEIKFLNKIEFKDENKNQDTSKTPKRLMFGIKSIMNNYEQVDISPFGINKKIFE

SEQ ID NO: 359 - protein, 1119 aa, Lactobacillus coryniformis
MGYRIGLDVGITSTGYAVLKTDKNGLPYKILTLDSVIYPRAENPQTGASLAEPRRIKRGLRRRTRRTKFRKQRTQQLFIHSGLLSKPEIEQILATPQAKYSVYELRVAGLDRRLTNSELFRVLYFFIGHRGFKSNRKAELNPENEADKKQMGQLLNSIEEIRKAIAEKGYRTVGELYLKDPKYNDHKRNKGYIDGYLSTPNRQMLVDEIKQILDKQRELGNEKLTDEFYATYLLGDENRAGIFQAQRDFDEGPGAGPYAGDQIKKMVGKDIFEPTEDRAAKATYTFQYFNLLQKMTSLNYQNTTGDTWHTLNGLDRQAIIDAVFAKAEKPTKTYKPTDFGELRKLLKLPDDARFNLVNYGSLQTQKEIETVEKKTRFVDFKAYHDLVKVLPEEMWQSRQLLDHIGTALTLYSSDKRRRRYFAEELNLPAELIEKLLPLNFSKFGHLSIKSMQNIIPYLEMGQVYSEATTNTGYDFRKKQISKDTIREEITNPVVRRAVTKTIKIVEQIIRRYGKPDGINIELARELGRNFKERGDIQKRQDKNRQTNDKIAAELTELGIPVNGQNIIRYKLHKEQNGVDPYTGDQIPFERAFSEGYEVDHIIPYSISWDDSYTNKVLTSAKCNREKGNRIPMVYLANNEQRLNALTNIADNIIRNSRKRQKLLKQKLSDEELKDWKQRNINDTRFITRVLYNYFRQAIEFNPELEKKQRVLPLNGEVTSKIRSRWGFLKVREDGDLHHAIDATVIAAITPKFIQQVTKYSQHQEVKNNQALWHDAEIKDAEYAAEAQRMDADLFNKIFNGFPLPWPEFLDELLARISDNPVEMMKSRSWNTYTPIEIAKLKPVFVVRLANHKISGPAHLDTIRSAKLFDEKGIVLSRVSITKLKINKKGQVATGDGIYDPENSNNGDKVVYSAIRQALEAHNGSGELAFPDGYLEYVDHGTKKLVRKVRVAKKVSLPVRLKNKAAADNGSMVRIDVFNTGKKFVFVPIYIKDTVEQVLPNKAIARGKSLWYQITESDQFCFSLYPGDMVHIESKTGIKPKYSNKENNTSVVPIKNFYGYFDGADIATASILVRAHDSSYTARSIGIAGLLKFEKYQVDYFGRYHKVHEKKRQLFVKRDE

SEQ ID NO: 360 - protein, 1195 aa, Elusimicrobium minutum
MQKNINTKQNHIYIKQAQKIKEKLGDKPYRIGLDLGVGSIGFAIVSMEENDGNVLLPKEIIMVGSRIFKASAGAADRKLSRGQRNNHRHTRERMRYLWKVLAEQKLALPVPADLDRKENSSEGETSAKRFLGDVLQKDIYELRVKSLDERLSLQELGYVLYHIAGHRGSSAIRTFENDSEEAQKENTENKKIAGNIKRLMAKKNYRTYGEYLYKEFFENKEKHKREKISNAANNHKFSPTRDLVIKEAEAILKKQAGKDGFHKELTEEYIEKLTKAIGYESEKLIPESGFCPYLKDEKRLPASHKLNEERRLWETLNNARYSDPIVDIVTGEITGYYEKQFTKEQKQKLFDYLLTGSELTPAQTKKLLGLKNTNFEDIILQGRDKKAQKIKGYKLIKLESMPFWARLSEAQQDSFLYDWNSCPDEKLLTEKLSNEYHLTEEEIDNAFNEIVLSSSYAPLGKSAMLIILEKIKNDLSYTEAVEEALKEGKLTKEKQAIKDRLPYYGAVLQESTQKIIAKGFSPQFKDKGYKTPHTNKYELEYGRIANPVVHQTLNELRKLVNEIIDILGKKPCEIGLETARELKKSAEDRSKLSREQNDNESNRNRIYEIYIRPQQQVIITRRENPRNYILKFELLEEQKSQCPFCGGQISPNDIINNQADIEHLFPIAESEDNGRNNLVISHSACNADKAKRSPWAAFASAAKDSKYDYNRILSNVKENIPHKAWRFNQGAFEKFIENKPMAARFKTDNSYISKVAHKYLACLFEKPNIICVKGSLTAQLRMAWGLQGLMIPFAKQLITEKESESFNKDVNSNKKIRLDNRHHALDAIVIAYASRGYGNLLNKMAGKDYKINYSERNWLSKILLPPNNIVWENIDADLESFESSVKTALKNAFISVKHDHSDNGELVKGTMYKIFYSERGYTLTTYKKLSALKLTDPQKKKTPKDFLETALLKFKGRESEMKNEKIKSAIENNKRLFDVIQDNLEKAKKLLEEENEKSKAEGKKEKNINDASIYQKAISLSGDKYVQLSKKEPGKFFAISKPTPTTTGYGYDTGDSLCVDLYYDNKGKLCGEIIRKIDAQQKNPLKYKEQGFTLFERIYGGDILEVDFDIHSDKNSFRNNTGSAPENRVFIKVGTFTEITNNNIQIWFGNIIKSTGGQDDSFTINSMQQYNPRKLILSSCGFIKYRSPILKNKEG

SEQ ID NO: 361 - skipped

SEQ ID NO: 362 - protein, 1056 aa, Pasteurella multocida
MQTTNLSYILGLDLGIASVGWAVVEINENEDPIGLIDVGVRIFERAEVPKTGESLALSRRLARSTRRLIRRRAHRLLLAKRFLKREGILSTIDLEKGLPNQAWELRVAGLERRLSAIEWGAVLLHLIKHRGYLSKRKNESQTNNKELGALLSGVAQNHQLLQSDDYRTPAELALKKFAKEEGHIRNQRGAYTHTFNRLDLLAELNLLFAQQHQFGNPHCKEHIQQYMTELLMWQKPALSGEAILKMLGKCTHEKNEFKAAKHTYSAERFVWLTKLNNLRILEDGAERALNEEERQLLINHPYEKSKLTYAQVRKLLGLSEQAIFKHLRYSKENAESATFMELKAWHAIRKALENQGLKDTWQDLAKKPDLLDEIGTAFSLYKTDEDIQQYLTNKVPNSVINALLVSLNFDKFIELSLKSLRKILPLMEQGKRYDQACREIYGHHYGEANQKTSQLLPAIPAQEIRNPVVLRTLSQARKVINAIIRQYGSPARVHIETGRELGKSFKERREIQKQQEDNRTKRESAVQKFKELFSDFSSEPKSKDILKFRLYEQQHGKCLYSGKEINIHRLNEKGYVEIDHALPFSRTWDDSFNNKVLVLASENQNKGNQTPYEWLQGKINSERWKNFVALVLGSQCSAAKKQRLLTQVIDDNKFIDRNLNDTRYIARFLSNYIQENLLLVGKNKKNVFTPNGQITALLRSRWGLIKARENNNRHHALDAIVVACATPSMQQKITRFIRFKEVHPYKIENRYEMVDQESGEIISPHFPEPWAYFRQEVNIRVFDNHPDTVLKEMLPDRPQANHQFVQPLFVSRAPTRKMSGQGHMETIKSAKRLAEGISVLRIPLTQLKPNLLENMVNKEREPALYAGLKARLAEFNQDPAKAFATPFYKQGGQQVKAIRVEQVQKSGVLVRENNGVADNASIVRTDVFIKNNKFFLVPIYTWQVAKGILPNKAIVAHKNEDEWEEMDEGAKFKFSLFPNDLVELKTKKEYFFGYYIGLDRATGNISLKEHDGEISKGKDGVYRVGVKLALSFEKYQVDELGKNRQICRPQQRQPVR

SEQ ID NO: 363 - protein, 1059 aa, Rhodovulum sp. PH10
MGIRFAFDLGTNSIGWAVWRTGPGVFGEDTAASLDGSGVLIFKDGRNPKDGQSLATMRRVPRQSRKRRDRFVLRRRDLLAALRKAGLFPVDVEEGRRLAATDPYHLRAKALDESLTPHEMGRVIFHLNQRRGFRSNRKADRQDREKGKIAEGSKRLAETLAATNCRTLGEFLWSRHRGTPRTRSPTRIRMEGEGAKALYAFYPTREMVRAEFERLWTAQSRFAPDLLTPERHEEIAGILFRQRDLAPPKIGCCTFEPSERRLPRALPSVEARGIYERLAHLRITTGPVSDRGLTRPERDVLASALLAGKSLTFKAVRKTLKILPHALVNFEEAGEKGLDGALTAKLLSKPDHYGAAWHGLSFAEKDTFVGKLLDEADEERLIRRLVTENRLSEDAARRCASIPLADGYGRLGRTANTEILAALVEETDETGTVVTYAEAVRRAGERTGRNWHHSDERDGVILDRLPYYGEILQRHVVPGSGEPEEKNEAARWGRLANPTVHIGLNQLRKVVNRLIAAHGRPDQIVVELARELKLNREQKERLDRENRKNREENERRTAILAEHGQRDTAENKIRLRLFEEQARANAGIALCPYTGRAIGIAELFTSEVEIDHILPVSLTLDDSLANRVLCRREANREKRRQTPFQAFGATPAWNDIVARAAKLPPNKRWRFDPAALERFEREGGFLGRQLNETKYLSRLAKIYLGKICDPDRVYVTPGTLTGLLRARWGLNSILSDSNFKNRSDHRHHAVDAVVIGVLTRGMIQRIAHDAARAEDQDLDRVFRDVPVPFEDFRDHVRERVSTITVAVKPEHGKGGALHEDTSYGLVPDTDPNAALGNLVVRKPIRSLTAGEVDRVRDRALRARLGALAAPFRDESGRVRDAKGLAQALEAFGAENGIRRVRILKPDASVVTIADRRTGVPYRAVAPGENHHVDIVQMRDGSWRGFAASVFEVNRPGWRPEWEVKKLGGKLVMRLHKGDMVELSDKDGQRRVKVVQQIEISANRVRLSPHNDGGKLQDRHADADDPFRWDLATIPLLKDRGCVAVRVDPIGVVTLRRSNV

SEQ ID NO: 364 - protein, 1096 aa, Eubacterium dolichum
MMEVFMGRLVLGLDIGITSVGFGIIDLDESEIVDYGVRLFKEGTAAENETRRTKRGGRRLKRRRVTRREDMLHLLKQAGIISTSFHPLNNPYDVRVKGLNERLNGEELATALLHLCKHRGSSVETIEDDEAKAKEAGETKKVLSMNDQLLKSGKYVCEIQKERLRTNGHIRGHENNFKTRAYVDEAFQILSHQDLSNELKSAIITIISRKRMYYDGPGGPLSPTPYGRYTYFGQKEPIDLIEKMRGKCSLFPNEPRAPKLAYSAELFNLLNDLNNLSIEGEKLTSEQKAMILKIVHEKGKITPKQLAKEVGVSLEQIRGFRIDTKGSPLLSELTGYKMIREVLEKSNDEHLEDHVFYDEIAEILTKTKDIEGRKKQISELSSDLNEESVHQLAGLTKFTAYHSLSFKALRLINEEMLKTELNQMQSITLFGLKQNNELSVKGMKNIQADDTAILSPVAKRAQRETFKVVNRLREIYGEFDSIVVEMAREKNSEEQRKAIRERQKFFEMRNKQVADIIGDDRKINAKLREKLVLYQEQDGKTAYSLEPIDLKLLIDDPNAYEVDHIIPISISLDDSITNKVLVTHRENQEKGNLTPISAFVKGRFTKGSLAQYKAYCLKLKEKNIKTNKGYRKKVEQYLLNENDIYKYDIQKEFINRNLVDTSYASRVVLNTLTTYFKQNEIPTKVFTVKGSLTNAFRRKINLKKDRDEDYGHHAIDALIIASMPKMRLLSTIFSRYKIEDIYDESTGEVFSSGDDSMYYDDRYFAFIASLKAIKVRKFSHKIDTKPNRSVADETIYSTRVIDGKEKVVKKYKDIYDPKFTALAEDILNNAYQEKYLMALHDPQTFDQIVKVVNYYFEEMSKSEKYFTKDKKGRIKISGMNPLSLYRDEHGMLKKYSKKGDGPAITQMKYFDGVLGNHIDISAHYQVRDKKVVLQQISPYRTDFYYSKENGYKFVTIRYKDVRWSEKKKKYVIDQQDYAMKKAEKKIDDTYEFQFSMHRDELIGITKAEGEALIYPDETWHNFNFFFHAGETPEILKFTATNNDKSNKIEVKPIHCYCKMRLMPTISKKIVRIDKYATDVVGNLYKVKKNTLKFEFD

SEQ ID NO: 365 - protein, 1132 aa, Nitratifractor salsuginis
MKKILGVDLGITSFGYAILQETGKDLYRCLDNSVVMRNNPYDEKSGESSQSIRSTQKSMRRLIEKRKKRIRCVAQTMERYGILDYSETMKINDPKNNPIKNRWQLRAVDAWKRPLSPQELFAIFAHMAKHRGYKSIATEDLIYELELELGLNDPEKESEKKADERRQVYNALRHLEELRKKYGGETIAQTIHRAVEAGDLRSYRNHDDYEKMIRREDIEEEIEKVLLRQAELGALGLPEEQVSELIDELKACITDQEMPTIDESLFGKCTFYKDELAAPAYSYLYDLYRLYKKLADLNIDGYEVTQEDREKVIEWVEKKIAQGKNLKKITHKDLRKILGLAPEQKIFGVEDERIVKGKKEPRTFVPFFFLADIAKFKELFASIQKHPDALQIFRELAEILQRSKTPQEALDRLRALMAGKGIDTDDRELLELFKNKRSGTRELSHRYILEALPLFLEGYDEKEVQRILGFDDREDYSRYPKSLRHLHLREGNLFEKEENPINNHAVKSLASWALGLIADLSWRYGPFDEIILETTRDALPEKIRKEIDKAMREREKALDKIIGKYKKEFPSIDKRLARKIQLWERQKGLDLYSGKVINLSQLLDGSADIEHIVPQSLGGLSTDYNTIVTLKSVNAAKGNRLPGDWLAGNPDYRERIGMLSEKGLIDWKKRKNLLAQSLDEIYTENTHSKGIRATSYLEALVAQVLKRYYPFPDPELRKNGIGVRMIPGKVTSKTRSLLGIKSKSRETNFHHAEDALILSTLTRGWQNRLHRMLRDNYGKSEAELKELWKKYMPHIEGLTLADYIDEAFRRFMSKGEESLFYRDMFDTIRSISYWVDKKPLSASSHKETVYSSRHEVPTLRKNILEAFDSLNVIKDRHKLTTEEFMKRYDKEIRQKLWLHRIGNTNDESYRAVEERATQIAQILTRYQLMDAQNDKEIDEKFQQALKELITSPIEVTGKLLRKMRFVYDKLNAMQIDRGLVETDKNMLGIHISKGPNEKLIFRRMDVNNAHELQKERSGILCYLNEMLFIFNKKGLIHYGCLRSYLEKGQGSKYIALFNPRFPANPKAQPSKFTSDSKIKQVGIGSATGIIKAHLDLDGHVRSYEVFGTLPEGSIEWFKEESGYGRVEDDPHH

SEQ ID NO: 366 - protein, 1173 aa, Rhodospirillum rubrum
MRPIEPWILGLDIGTDSLGWAVFSCEEKGPPTAKELLGGGVRLFDSGRDAKDHTSRQAERGAFRRARRQTRTWPWRRDRLIALFQAAGLTPPAAETRQIALALRREAVSRPLAPDALWAALLHLAHHRGFRSNRIDKRERAAAKALAKAKPAKATAKATAPAKEADDEAGFWEGAEAALRQRMAASGAPTVGALLADDLDRGQPVRMRYNQSDRDGVVAPTRALIAEELAEIVARQSSAYPGLDWPAVTRLVLDQRPLRSKGAGPCAFLPGEDRALRALPTVQDFIIRQTLANLRLPSTSADEPRPLTDEEHAKALALLSTARFVEWPALRRALGLKRGVKFTAETERNGAKQAARGTAGNLTEAILAPLIPGWSGWDLDRKDRVFSDLWAARQDRSALLALIGDPRGPTRVTEDETAEAVADAIQIVLPTGRASLSAKAARAIAQAMAPGIGYDEAVTLALGLHHSHRPRQERLARLPYYAAALPDVGLDGDPVGPPPAEDDGAAAEAYYGRIGNISVHIALNETRKIVNALLHRHGPILRLVMVETTRELKAGADERKRMIAEQAERERENAEIDVELRKSDRWMANARERRQRVRLARRQNNLCPYTSTPIGHADLLGDAYDIDHVIPLARGGRDSLDNMVLCQSDANKTKGDKTPWEAFHDKPGWIAQRDDFLARLDPQTAKALAWRFADDAGERVARKSAEDEDQGFLPRQLTDTGYIARVALRYLSLVTNEPNAVVATNGRLTGLLRLAWDITPGPAPRDLLPTPRDALRDDTAARRFLDGLTPPPLAKAVEGAVQARLAALGRSRVADAGLADALGLTLASLGGGGKNRADHRHHFIDAAMIAVTTRGLINQINQASGAGRILDLRKWPRTNFEPPYPTFRAEVMKQWDHIHPSIRPAHRDGGSLHAATVFGVRNRPDARVLVQRKPVEKLFLDANAKPLPADKIAEIIDGFASPRMAKRFKALLARYQAAHPEVPPALAALAVARDPAFGPRGMTANTVIAGRSDGDGEDAGLITPFRANPKAAVRTMGNAVYEVWEIQVKGRPRWTHRVLTRFDRTQPAPPPPPENARLVMRLRRGDLVYWPLESGDRLFLVKKMAVDGRLALWPARLATGKATALYAQLSCPNINLNGDQGYCVQSAEGIRKEKIRTTSCTALGRLRLSKKAT

SEQ ID NO: 367 - protein, 1021 aa, Clostridium cellulolyticum
MKYTLGLDVGIASVGWAVIDKDNNKIIDLGVRCFDKAEESKTGESLATARRIARGMRRRISRRSQRLRLVKKLFVQYEIIKDSSEFNRIFDTSRDGWKDPWELRYNALSRILKPYELVQVLTHITKRRGFKSNRKEDLSTTKEGVVITSIKNNSEMLRTKNYRTIGEMIFMETPENSNKRNKVDEYIHTIAREDLLNEIKYIFSIQRKLGSPFVTEKLEHDFLNIWEFQRPFASGDSILSKVGKCTLLKEELRAPTSCYTSEYFGLLQSINNLVLVEDNNTLTLNNDQRAKIIEYAHFKNEIKYSEIRKLLDIEPEILFKAHNLTHKNPSGNNESKKFYEMKSYHKLKSTLPTDIWGKLHSNKESLDNLFYCLTVYKNDNEIKDYLQANNLDYLIEYIAKLPTFNKFKHLSLVAMKRIIPFMEKGYKYSDACNMAELDFTGSSKLEKCNKLTVEPIIENVTNPVVIRALTQARKVINAIIQKYGLPYMVNIELAREAGMTRQDRDNLKKEHENNRKAREKISDLIRQNGRVASGLDILKWRLWEDQGGRCAYSGKPIPVCDLLNDSLTQIDHIYPYSRSMDDSYMNKVLVLTDENQNKRSYTPYEVWGSTEKWEDFEARIYSMHLPQSKEKRLLNRNFITKDLDSFISRNLNDTRYISRFLKNYIESYLQFSNDSPKSCVVCVNGQCTAQLRSRWGLNKNREESDLHHALDAAVIACADRKIIKEITNYYNERENHNYKVKYPLPWHSFRQDLMETLAGVFISRAPRRKITGPAHDETIRSPKHFNKGLTSVKIPLTTVTLEKLETMVKNTKGGISDKAVYNVLKNRLIEHNNKPLKAFAEKIYKPLKNGTNGAIIRSIRVETPSYTGVFRNEGKGISDNSLMVRVDVFKKKDKYYLVPIYVAHMIKKELPSKAIVPLKPESQWELIDSTHEFLFSLYQNDYLVIKTKKGITEGYYRSCHRGTGSLSLMPHFANNKNVKIDIGVRTAISIEKYNVDILGNKSIVKGEPRRGMEKYNSFKSN

SEQ ID NO: 368 - protein, 1024 aa, Helicobacter mustelae
MIRTLGIDIGIASIGWAVIEGEYTDKGLENKEIVASGVRVFTKAENPKNKESLALPRTLARSARRRNARKKGRIQQVKHYLSKALGLDLECFVQGEKLATLFQTSKDFLSPWELRERALYRVLDKEELARVILHIAKRRGYDDITYGVEDNDSGKIKKAIAENSKRIKEEQCKTIGEMMYKLYFQKSLNVRNKKESYNRCVGRSELREELKTIFQIQQELKSPWVNEELIYKLLGNPDAQSKQEREGLIFYQRPLKGFGDKIGKCSHIKKGENSPYRACKHAPSAEEFVALTKSINFLKNLTNRHGLCFSQEDMCVYLGKILQEAQKNEKGLTYSKLKLLLDLPSDFEFLGLDYSGKNPEKAVFLSLPSTFKLNKITQDRKTQDKIANILGANKDWEAILKELESLQLSKEQIQTIKDAKLNFSKHINLSLEALYHLLPLMREGKRYDEGVEILQERGIFSKPQPKNRQLLPPLSELAKEESYFDIPNPVLRRALSEFRKVVNALLEKYGGFHYFHIELTRDVCKAKSARMQLEKINKKNKSENDAASQLLEVLGLPNTYNNRLKCKLWKQQEEYCLYSGEKITIDHLKDQRALQIDHAFPLSRSLDDSQSNKVLCLTSSNQEKSNKTPYEWLGSDEKKWDMYVGRVYSSNFSPSKKRKLTQKNFKERNEEDFLARNLVDTGYIGRVTKEYIKHSLSFLPLPDGKKEHIRIISGSMTSTMRSFWGVQEKNRDHHLHHAQDAIIIACIEPSMIQKYTTYLKDKETHRLKSHQKAQILREGDHKLSLRWPMSNFKDKIQESIQNIIPSHHVSHKVTGELHQETVRTKEFYYQAFGGEEGVKKALKFGKIREINQGIVDNGAMVRVDIFKSKDKGKFYAVPIYTYDFAIGKLPNKAIVQGKKNGIIKDWLEMDENYEFCFSLFKNDCIKIQTKEMQEAVLAIYKSTNSAKATIELEHLSKYALKNEDEEKMFTDTDKEKNKTMTRESCGIQGLKVFQKVKLSVLGEVLEHKPRNRQNIALKTTPKHV

SEQ ID NO: 369 - protein, 1092 aa, Ilyobacter polytropus
MKYSIGLDIGIASVGWSVINKDKERIEDMGVRIFQKAENPKDGSSLASSRREKRGSRRRNRRKKHRLDRIKNILCESGLVKKNEIEKIYKNAYLKSPWELRAKSLEAKISNKEIAQILLHIAKRRGFKSFRKTDRNADDTGKLLSGIQENKKIMEEKGYLTIGDMVAKDPKFNTHVRNKAGSYLFSFSRKLLEDEVRKIQAKQKELGNTHFTDDVLEKYIEVFNSQRNFDEGPSKPSPYYSEIGQIAKMIGNCTFESSEKRTAKNTWSGERFVFLQKLNNFRIVGLSGKRPLTEEERDIVEKEVYLKKEVRYEKLRKILYLKEEERFGDLNYSKDEKQDKKTEKTKFISLIGNYTIKKLNLSEKLKSEIEEDKSKLDKIIEILTFNKSDKTIESNLKKLELSREDIEILLSEEFSGTLNLSLKAIKKILPYLEKGLSYNEACEKADYDYKNNGIKFKRGELLPVVDKDLIANPVVLRAISQTRKVVNAIIRKYGTPHTIHVEVARDLAKSYDDRQTIIKENKKRELENEKTKKFISEEFGIKNVKGKLLLKYRLYQEQEGRCAYSRKELSLSEVILDESMTDIDHIIPYSRSMDDSYSNKVLVLSGENRKKSNLLPKEYFDRQGRDWDTFVLNVKAMKIHPRKKSNLLKEKFTREDNKDWKSRALNDTRYISRFVANYLENALEYRDDSPKKRVFMIPGQLTAQLRARWRLNKVRENGDLHHALDAAVVAVTDQKAINNISNISRYKELKNCKDVIPSIEYHADEETGEVYFEEVKDTRFPMPWSGFDLELQKRLESENPREEFYNLLSDKRYLGWFNYEEGFIEKLRPVFVSRMPNRGVKGQAHQETIRSSKKISNQIAVSKKPLNSIKLKDLEKMQGRDTDRKLYEALKNRLEEYDDKPEKAFAEPFYKPTNSGKRGPLVRGIKVEEKQNVGVYVNGGQASNGSMVRIDVFRKNGKFYTVPIYVHQTLLKELPNRAINGKPYKDWDLIDGSFEFLYSFYPNDLIEIEFGKSKSIKNDNKLTKTEIPEVNLSEVLGYYRGMDTSTGAATIDTQDGKIQMRIGIKTVKNIKKYQVDVLGNVYKVKREKRQTF

SEQ ID NO: 370 - protein, 1179 aa, Sphaerochaeta globus
MSKKVSRRYEEQAQEICQRLGSRPYSIGLDLGVGSIGVAVAAYDPIKKQPSDLVFVSSRIFIPSTGAAERRQKRGQRNSLRHRANRLKFLWKLLAERNLMLSYSEQDVPDPARLRFEDAVVRANPYELRLKGLNEQLTLSELGYALYHIANHRGSSSVRTFLDEEKSSDDKKLEEQQAMTEQLAKEKGISTFIEVLTAFNTNGLIGYRNSESVKSKGVPVPTRDIISNEIDVLLQTQKQFYQEILSDEYCDRIVSAILFENEKIVPEAGCCPYFPDEKKLPRCHFLNEERRLWEAINNARIKMPMQEGAAKRYQSASFSDEQRHILFHIARSGTDITPKLVQKEFPALKTSIIVLQGKEKAIQKIAGFRFRRLEEKSFWKRLSEEQKDDFFSAWTNTPDDKRLSKYLMKHLLLTENEVVDALKTVSLIGDYGPIGKTATQLLMKHLEDGLTYTEALERGMETGEFQELSVWEQQSLLPYYGQILTGSTQALMGKYWHSAFKEKRDSEGFFKPNTNSDEEKYGRIANPVVHQTLNELRKLMNELITILGAKPQEITVELARELKVGAEKREDIIKQQTKQEKEAVLAYSKYCEPNNLDKRYIERFRLLEDQAFVCPYCLEHISVADIAAGRADVDHIFPRDDTADNSYGNKVVAHRQCNDIKGKRTPYAAFSNTSAWGPIMHYLDETPGMWRKRRKFETNEEEYAKYLQSKGFVSRFESDNSYIAKAAKEYLRCLFNPNNVTAVGSLKGMETSILRKAWNLQGIDDLLGSRHWSKDADTSPTMRKNRDDNRHHGLDAIVALYCSRSLVQMINTMSEQGKRAVEIEAMIPIPGYASEPNLSFEAQRELFRKKILEFMDLHAFVSMKTDNDANGALLKDTVYSILGADTQGEDLVFVVKKKIKDIGVKIGDYEEVASAIRGRITDKQPKWYPMEMKDKIEQLQSKNEAALQKYKESLVQAAAVLEESNRKLIESGKKPIQLSEKTISKKALELVGGYYYLISNNKRTKTFVVKEPSNEVKGFAFDTGSNLCLDFYHDAQGKLCGEIIRKIQAMNPSYKPAYMKQGYSLYVRLYQGDVCELRASDLTEAESNLAKTTHVRLPNAKPGRTFVIIITFTEMGSGYQIYFSNLAKSKKGQDTSFTLTTIKNYDVRKVQLSSAGLVRYVSPLLVDKIEKDEVALCGE

SEQ ID NO: 371 - protein, 1054 aa, Staphylococcus lugdunensis
MNQKFILGLDIGITSVGYGLIDYETKNIIDAGVRLFPEANVENNEGRRSKRGSRRLKRRRIHRLERVKKLLEDYNLLDQSQIPQSTNPYAIRVKGLSEALSKDELVIALLHIAKRRGIHKIDVIDSNDDVGNELSTKEQLNKNSKLLKDKFVCQIQLERMNEGQVRGEKNRFKTADIIKEIIQLLNVQKNFHQLDENFINKYIELVEMRREYFEGPGKGSPYGWEGDPKAWYETLMGHCTYFPDELRSVKYAYSADLFNALNDLNNLVIQRDGLSKLEYHEKYHIIENVFKQKKKPTLKQIANEINVNPEDIKGYRITKSGKPQFTEFKLYHDLKSVLFDQSILENEDVLDQIAEILTIYQDKDSIKSKLTELDILLNEEDKENIAQLTGYTGTHRLSLKCIRLVLEEQWYSSRNQMEIFTHLNIKPKKINLTAANKIPKAMIDEFILSPVVKRTFGQAINLINKIIEKYGVPEDIIIELARENNSKDKQKFINEMQKKNENTRKRINEIIGKYGNQNAKRLVEKIRLHDEQEGKCLYSLESIPLEDLLNNPNHYEVDHIIPRSVSFDNSYHNKVLVKQSENSKKSNLTPYQYFNSGKSKLSYNQFKQHILNLSKSQDRISKKKKEYLLEERDINKFEVQKEFINRNLVDTRYATRELTNYLKAYFSANNMNVKVKTINGSFTDYLRKVWKFKKERNHGYKHHAEDALIIANADFLFKENKKLKAVNSVLEKPEIESKQLDIQVDSEDNYSEMFIIPKQVQDIKDFRNFKYSHRVDKKPNRQLINDTLYSTRKKDNSTYIVQTIKDIYAKDNTTLKKQFDKSPEKFLMYQHDPRTFEKLEVIMKQYANEKNPLAKYHEETGEYLTKYSKKNNGPIVKSLKYIGNKLGSHLDVTHQFKSSTKKLVKLSIKPYRFDVYLTDKGYKFITISYLDVLKKDNYYYIPEQKYDKLKLGKAIDKNAKFIASFYKNDLIKLDGEIYKIIGVNSDTRNMIELDLPDIRYKEYCELNNIKGEPRIKKTIGKKVNSIEKLTTDVLGNVFTNTQYTKPQLLFKRGN

SEQ ID NO: 372 - protein, 1061 aa, Treponema sp. JC4
MIMKLEKWRLGLDLGTNSIGWSVFSLDKDNSVQDLIDMGVRIFSDGRDPKTKEPLAVARRTARSQRKLIYRRKLRRKQVFKFLQEQGLFPKTKEECMTLKSLNPYELRIKALDEKLEPYELGRALFNLAVRRGFKSNRKDGSREEVSEKKSPDEIKTQADMQTHLEKAIKENGCRTITEFLYKNQGENGGIRFAPGRMTYYPTRKMYEEEFNLIRSKQEKYYPQVDWDDIYKAIFYQRPLKPQQRGYCIYENDKERTFKAMPCSQKLRILQDIGNLAYYEGGSKKRVELNDNQDKVLYELLNSKDKVTFDQMRKALCLADSNSFNLEENRDFLIGNPTAVKMRSKNRFGKLWDEIPLEEQDLIIETIITADEDDAVYEVIKKYDLTQEQRDFIVKNTILQSGTSMLCKEVSEKLVKRLEEIADLKYHEAVESLGYKFADQTVEKYDLLPYYGKVLPGSTMEIDLSAPETNPEKHYGKISNPTVHVALNQTRVVVNALIKEYGKPSQIAIELSRDLKNNVEKKAEIARKQNQRAKENIAINDTISALYHTAFPGKSFYPNRNDRMKYRLWSELGLGNKCIYCGKGISGAELFTKEIEIEHILPFSRTLLDAESNLTVAHSSCNAFKAERSPFEAFGTNPSGYSWQEIIQRANQLKNTSKKNKFSPNAMDSFEKDSSFIARQLSDNQYIAKAALRYLKCLVENPSDVWTTNGSMTKLLRDKWEMDSILCRKFTEKEVALLGLKPEQIGNYKKNRFDHRHHAIDAVVIGLTDRSMVQKLATKNSHKGNRIEIPEFPILRSDLIEKVKNIVVSFKPDHGAEGKLSKETLLGKIKLHGKETFVCRENIVSLSEKNLDDIVDEIKSKVKDYVAKHKGQKIEAVLSDFSKENGIKKVRCVNRVQTPIEITSGKISRYLSPEDYFAAVIWEIPGEKKTFKAQYIRRNEVEKNSKGLNVVKPAVLENGKPHPAAKQVCLLHKDDYLEFSDKGKMYFCRIAGYAATNNKLDIRPVYAVSYCADWINSTNETMLTGYWKPTPTQNWVSVNVLFDKQKARLVTVSPIGRVFRK

SEQ ID NO: 373 - protein, 1011 aa, Deltaproteobacterium HF0070
MSSKAIDSLEQLDLFKPQEYTLGLDLGIKSIGWAILSGERIANAGVYLFETAEELNSTGNKLISKAAERGRKRRIRRMLDRKARRGRHIRYLLEREGLPTDELEEVVVHQSNRTLWDVRAEAVERKLTKQELAAVLFHLVRHRGYFPNTKKLPPDDESDSADEEQGKINRATSRLREELKASDCKTIGQFLAQNRDRQRNREGDYSNLMARKLVFEEALQILAFQRKQGHELSKDFEKTYLDVLMGQRSGRSPKLGNCSLIPSELRAPSSAPSTEWFKFLQNLGNLQISNAYREEWSIDAPRRAQIIDACSQRSTSSYWQIRRDFQIPDEYRFNLVNYERRDPDVDLQEYLQQQERKTLANFRNWKQLEKIIGTGHPIQTLDEAARLITLIKDDEKLSDQLADLLPEASDKAITQLCELDFTTAAKISLEAMYRILPHMNQGMGFFDACQQESLPEIGVPPAGDRVPPFDEMYNPVVNRVLSQSRKLINAVIDEYGMPAKIRVELARDLGKGRELRERIKLDQLDKSKQNDQRAEDFRAEFQQAPRGDQSLRYRLWKEQNCTCPYSGRMIPVNSVLSEDTQIDHILPISQSFDNSLSNKVLCFTEENAQKSNRTPFEYLDAADFQRLEAISGNWPEAKRNKLLHKSFGKVAEEWKSRALNDTRYLTSALADHLRHHLPDSKIQTVNGRITGYLRKQWGLEKDRDKHTHHAVDAIVVACTTPAIVQQVTLYHQDIRRYKKLGEKRPTPWPETFRQDVLDVEEEIFITRQPKKVSGGIQTKDTLRKHRSKPDRQRVALTKVKLADLERLVEKDASNRNLYEHLKQCLEESGDQPTKAFKAPFYMPSGPEAKQRPILSKVTLLREKPEPPKQLTELSGGRRYDSMAQGRLDIYRYKPGGKRKDEYRVVLQRMIDLMRGEENVHVFQKGVPYDQGPEIEQNYTFLFSLYFDDLVEFQRSADSEVIRGYYRTFNIANGQLKISTYLEGRQDFDFFGANRLAHFAKVQVNLLGKVIK

SEQ ID NO: 374 - protein, 1029 aa, Alicycliphilus denitrificans
MRSLRYRLALDLGSTSLGWALFRLDACNRPTAVIKAGVRIFSDGRNPKDGSSLAVTRRAARAMRRRRDRLLKRKTRMQAKLVEHGFFPADAGKRKALEQLNPYALRAKGLQEALLPGEFARALFHINQRRGFKSNRKTDKKDNDSGVLKKAIGQLRQQMAEQGSRTVGEYLWTRLQQGQGVRARYREKPYTTEEGKKRIDKSYDLYIDRAMIEQEFDALWAAQAAFNPTLFHEAARADLKDTLLHQRPLRPVKPGRCTLLPEEERAPLALPSTQRFRIHQEVNHLRLLDENLREVALTLAQRDAVVTALETKAKLSFEQIRKLLKLSGSVQFNLEDAKRTELKGNATSAALARKELFGAAWSGFDEALQDEIVWQLVTEEGEGALIAWLQTHTGVDEARAQAIVDVSLPEGYGNLSRKALARIVPALRAAVITYDKAVQAAGFDHHSQLGFEYDASEVEDLVHPETGEIRSVFKQLPYYGKALQRHVAFGSGKPEDPDEKRYGKIANPTVHIGLNQVRMVVNALIRRYGRPTEVVIELARDLKQSREQKVEAQRRQADNQRRNARIRRSIAEVLGIGEERVRGSDIQKWICWEELSFDAADRRCPYSGVQISAAMLLSDEVEVEHILPFSKTLDDSLNNRTVAMRQANRIKRNRTPWDARAEFEAQGWSYEDILQRAERMPLRKRYRFAPDGYERWLGDDKDFLARALNDTRYLSRVAAEYLRLVCPGTRVIPGQLTALLRGKFGLNDVLGLDGEKNRNDHRHHAVDACVIGVTDQGLMQRFATASAQARGDGLTRLVDGMPMPWPTYRDHVERAVRHIWVSHRPDHGFEGAMMEETSYGIRKDGSIKQRRKADGSAGREISNLIRIHEATQPLRHGVSADGQPLAYKGYVGGSNYCIEITVNDKGKWEGEVISTFRAYGVVRAGGMGRLRNPHEGQNGRKLIMRLVIGDSVRLEVDGAERTMRIVKISGSNGQIFMAPIHEANVDARNTDKQDAFTYTSKYAGSLQKAKTRRVTISPIGEVRDPGFKG

SEQ ID NO: 375 - protein, 1168 aa, Azospirillum sp. B510
MARPAFRAPRREHVNGWTPDPHRISKPFFILVSWHLLSRVVIDSSSGCFPGTSRDHTDKFAEWECAVQPYRLSFDLGTNSIGWGLLNLDRQGKPREIRALGSRIFSDGRDPQDKASLAVARRLARQMRRRRDRYLTRRTRLMGALVRFGLMPADPAARKRLEVAVDPYLARERATRERLEPFEIGRALFHLNQRRGYKPVRTATKPDEEAGKVKEAVERLEAAIAAAGAPTLGAWFAWRKTRGETLRARLAGKGKEAAYPFYPARRMLEAEFDTLWAEQARHHPDLLTAEAREILRHRIFHQRPLKPPPVGRCTLYPDDGRAPRALPSAQRLRLFQELASLRVIHLDLSERPLTPAERDRIVAFVQGRPPKAGRKPGKVQKSVPFEKLRGLLELPPGTGFSLESDKRPELLGDETGARIAPAFGPGWTALPLEEQDALVELLLTEAEPERAIAALTARWALDEATAAKLAGATLPDFHGRYGRRAVAELLPVLERETRGDPDGRVRPIRLDEAVKLLRGGKDHSDFSREGALLDALPYYGAVLERHVAFGTGNPADPEEKRVGRVANPTVHIALNQLRHLVNAILARHGRPEEIVIELARDLKRSAEDRRREDKRQADNQKRNEERKRLILSLGERPTPRNLLKLRLWEEQGPVENRRCPYSGETISMRMLLSEQVDIDHILPFSVSLDDSAANKVVCLREANRIKRNRSPWEAFGHDSERWAGILARAEALPKNKRWRFAPDALEKLEGEGGLRARHLNDTRHLSRLAVEYLRCVCPKVRVSPGRLTALLRRRWGIDAILAEADGPPPEVPAETLDPSPAEKNRADHRHHALDAVVIGCIDRSMVQRVQLAAASAEREAAAREDNIRRVLEGFKEEPWDGFRAELERRARTIVVSHRPEHGIGGALHKETAYGPVDPPEEGFNLVVRKPIDGLSKDEINSVRDPRLRRALIDRLAIRRRDANDPATALAKAAEDLAAQPASRGIRRVRVLKKESNPIRVEHGGNPSGPRSGGPFHKLLLAGEVHHVDVALRADGRRWVGHWVTLFEAHGGRGADGAAAPPRLGDGERFLMRLHKGDCLKLEHKGRVRVMQVVKLEPSSNSVVVVEPHQVKTDRSKHVKISCDQLRARGARRVTVDPLGRVRVHAPGARVGIGGDAGRTAMEPAEDIS

SEQ ID NO: 376 - protein, 1064 aa, Bradyrhizobium sp. BTAi1
MKRTSLRAYRLGVDLGANSLGWFVVWLDDHGQPEGLGPGGVRIFPDGRNPQSKQSNAAGRRLARSARRRRDRYLQRRGKLMGLLVKHGLMPADEPARKRLECLDPYGLRAKALDEVLPLHHVGRALFHLNQRRGLFANRAIEQGDKDASAIKAAAGRLQTSMQACGARTLGEFLNRRHQLRATVRARSPVGGDVQARYEFYPTRAMVDAEFEAIWAAQAPHHPTMTAEAHDTIREAIFSQRAMKRPSIGKCSLDPATSQDDVDGFRCAWSHPLAQRFRIWQDVRNLAVVETGPTSSRLGKEDQDKVARALLQTDQLSFDEIRGLLGLPSDARFNLESDRRDHLKGDATGAILSARRHFGPAWHDRSLDRQIDIVALLESALDEAAIIASLGTTHSLDEAAAQRALSALLPDGYCRLGLRAIKRVLPLMEAGRTYAEAASAAGYDHALLPGGKLSPTGYLPYYGQWLQNDVVGSDDERDTNERRWGRLPNPTVHIGIGQLRRVVNELIRWHGPPAEITVELTRDLKLSPRRLAELEREQAENQRKNDKRTSLLRKLGLPASTHNLLKLRLWDEQGDVASECPYTGEAIGLERLVSDDVDIDHLIPFSISWDDSAANKVVCMRYANREKGNRTPFEAFGHRQGRPYDWADIAERAARLPRGKRWRFGPGARAQFEELGDFQARLLNETSWLARVAKQYLAAVTHPHRIHVLPGRLTALLRATWELNDLLPGSDDRAAKSRKDHRHHAIDALVAALTDQALLRRMANAHDDTRRKIEVLLPWPTFRIDLETRLKAMLVSHKPDHGLQARLHEDTAYGTVEHPETEDGANLVYRKTFVDISEKEIDRIRDRRLRDLVRAHVAGERQQGKTLKAAVLSFAQRRDIAGHPNGIRHVRLTKSIKPDYLVPIRDKAGRIYKSYNAGENAFVDILQAESGRWIARATTVFQANQANESHDAPAAQPIMRVFKGDMLRIDHAGAEKFVKIVRLSPSNNLLYLVEHHQAGVFQTRHDDPEDSFRWLFASFDKLREWNAELVRIDTLGQPWRRKRGLETGSEDATRIGWTRPKKWP

SEQ ID NO: 377 - protein, 1037 aa, Parvibaculum lavamentivorans
MERIFGFDIGTTSIGFSVIDYSSTQSAGNIQRLGVRIFPEARDPDGTPLNQQRRQKRMMRRQLRRRRIRRKALNETLHEAGFLPAYGSADWPVVMADEPYELRRRGLEEGLSAYEFGRAIYHLAQHRHFKGRELEESDTPDPDVDDEKEAANERAATLKALKNEQTTLGAWLARRPPSDRKRGIHAHRNVVAEEFERLWEVQSKFHPALKSEEMRARISDTIFAQRPVFWRKNTLGECRFMPGEPLCPKGSWLSQQRRMLEKLNNLAIAGGNARPLDAEERDAILSKLQQQASMSWPGVRSALKALYKQRGEPGAEKSLKFNLELGGESKLLGNALEAKLADMFGPDWPAHPRKQEIRHAVHERLWAADYGETPDKKRVIILSEKDRKAHREAAANSFVADFGITGEQAAQLQALKLPTGWEPYSIPALNLFLAELEKGERFGALVNGPDWEGWRRTNFPHRNQPTGEILDKLPSPASKEERERISQLRNPTVVRTQNELRKVVNNLIGLYGKPDRIRIEVGRDVGKSKREREEIQSGIRRNEKQRKKATEDLIKNGIANPSRDDVEKWILWKEGQERCPYTGDQIGFNALFREGRYEVEHIWPRSRSFDNSPRNKTLCRKDVNIEKGNRMPFEAFGHDEDRWSAIQIRLQGMVSAKGGTGMSPGKVKRFLAKTMPEDFAARQLNDTRYAAKQILAQLKRLWPDMGPEAPVKVEAVTGQVTAQLRKLWTLNNILADDGEKTRADHRHHAIDALTVACTHPGMTNKLSRYWQLRDDPRAEKPALTPPWDTIRADAEKAVSEIVVSHRVRKKVSGPLHKETTYGDTGTDIKTKSGTYRQFVTRKKIESLSKGELDEIRDPRIKEIVAAHVAGRGGDPKKAFPPYPCVSPGGPEIRKVRLTSKQQLNLMAQTGNGYADLGSNHHIAIYRLPDGKADFEIVSLFDASRRLAQRNPIVQRTRADGASFVMSLAAGEAIMIPEGSKKGIWIVQGVWASGQVVLERDTDADHSTTTRPMPNPILKDDAKKVSIDPIGRVRPSND

SEQ ID NO: 378 - protein, 1218 aa, Prevotella timonensis
MNKRILGLDTGTNSLGWAVVDWDEHAQSYELIKYGDVIFQEGVKIEKGIESSKAAERSGYKAIRKQYFRRRLRKIQVLKVLVKYHLCPYLSDDDLRQWHLQKQYPKSDELMLWQRTSDEEGKNPYYDRHRCLHEKLDLTVEADRYTLGRALYHLTQRRGFLSNRLDTSADNKEDGVVKSGISQLSTEMEEAGCEYLGDYFYKLYDAQGNKVRIRQRYTDRNKHYQHEFDAICEKQELSSELIEDLQRAIFFQLPLKSQRHGVGRCTFERGKPRCADSHPDYEEFRMLCFVNNIQVKGPHDLELRPLTYEEREKIEPLFFRKSKPNFDFEDIAKALAGKKNYAWIHDKEERAYKFNYRMTQGVPGCPTIAQLKSIFGDDWKTGIAETYTLIQKKNGSKSLQEMVDDVWNVLYSFSSVEKLKEFAHHKLQLDEESAEKFAKIKLSHSFAALSLKAIRKFLPFLRKGMYYTHASFFANIPTIVGKEIWNKEQNRKYIMENVGELVFNYQPKHREVQGTIEMLIKDFLANNFELPAGATDKLYHPSMIETYPNAQRNEFGILQLGSPRTNAIRNPMAMRSLHILRRVVNQLLKESIIDENTEVHVEYARELNDANKRRAIADRQKEQDKQHKKYGDEIRKLYKEETGKDIEPTQTDVLKFQLWEEQNHHCLYTGEQIGITDFIGSNPKFDIEHTIPQSVGGDSTQMNLTLCDNRFNREVKKAKLPTELANHEEILTRIEPWKNKYEQLVKERDKQRTFAGMDKAVKDIRIQKRHKLQMEIDYWRGKYERFTMTEVPEGFSRRQGTGIGLISRYAGLYLKSLFHQADSRNKSNVYVVKGVATAEFRKMWGLQSEYEKKCRDNHSHHCMDAITIACIGKREYDLMAEYYRMEETFKQGRGSKPKFSKPWATFTEDVLNIYKNLLVVHDTPNNMPKHTKKYVQTSIGKVLAQGDTARGSLHLDTYYGAIERDGEIRYVVRRPLSSFTKPEELENIVDETVKRTIKEAIADKNFKQAIAEPIYMNEEKGILIKKVRCFAKSVKQPINIRQHRDLSKKEYKQQYHVMNENNYLLAIYEGLVKNKVVREFEIVSYIEAAKYYKRSQDRNIFSSIVPTHSTKYGLPLKTKLLMGQLVLMFEENPDEIQVDNTKDLVKRLYKVVGIEKDGRIKFKYHQEARKEGLPIFSTPYKNNDDYAPIFRQSINNINILVDGIDFTIDILGKVTLKE

SEQ ID NO: 379 - protein, 1088 aa, Bacillus smithii
MNYKMGLDIGIASVGWAVINLDLKRIEDLGVRIFDKAEHPQNGESLALPRRIARSARRRLRRRKHRLERIRRLLVSENVLTKEEMNLLFKQKKQIDVWQLRVDALERKLNNDELARVLLHLAKRRGFKSNRKSERNSKESSEFLKNIEENQSILAQYRSVGEMIVKDSKFAYHKRNKLDSYSNMIARDDLEREIKLIFEKQREFNNPVCTERLEEKYLNIWSSQRPFASKEDIEKKVGFCTFEPKEKRAPKATYTFQSFIVWEHINKLRLVSPDETRALTEIERNLLYKQAFSKNKMTYYDIRKLLNLSDDIHFKGLLYDPKSSLKQIENIRFLELDSYHKIRKCIENVYGKDGIRMFNETDIDTFGYALTIFKDDEDIVAYLQNEYITKNGKRVSNLANKVYDKSLIDELLNLSFSKFAHLSMKAIRNILPYMEQGEIYSKACELAGYNFTGPKKKEKALLLPVIPNIANPVVMRALTQSRKVVNAIIKKYGSPVSIHIELARDLSHSFDERKKIQKDQTENRKKNETAIKQLIEYELTKNPTGLDIVKFKLWSEQQGRCMYSLKPIELERLLEPGYVEVDHILPYSRSLDDSYANKVLVLTKENREKGNHTPVEYLGLGSERWKKFEKFVLANKQFSKKKKQNLLRLRYEETEEKEFKERNLNDTRYISKFFANFIKEHLKFADGDGGQKVYTINGKITAHLRSRWDFNKNREESDLHHAVDAVIVACATQGMIKKITEFYKAREQNKESAKKKEPIFPQPWPHFADELKARLSKFPQESIEAFALGNYDRKKLESLRPVFVSRMPKRSVTGAAHQETLRRCVGIDEQSGKIQTAVKTKLSDIKLDKDGHFPMYQKESDPRTYEAIRQRLLEHNNDPKKAFQEPLYKPKKNGEPGPVIRTVKIIDTKNKVVHLDGSKTVAYNSNIVRTDVFEKDGKYYCVPVYTMDIMKGTLPNKAIEANKPYSEWKEMTEEYTFQFSLFPNDLVRIVLPREKTIKTSTNEEIIIKDIFAYYKTIDSATGGLELISHDRNFSLRGVGSKTLKRFEKYQVDVLGNIHKVKGEKRVGLAAPTNQKKGKTVDSLQSVSD

SEQ ID NO: 380 - protein, 1035 aa, Candidatus Puniceispirillum marinum
MRRLGLDLGTNSIGWCLLDLGDDGEPVSIFRTGARIFSDGRDPKSLGSLKATRREARLTRRRRDRFIQRQKNLINALVKYGLMPADEIQRQALAYKDPYPIRKKALDEAIDPYEMGRAIFHINQRRGFKSNRKSADNEAGVVKQSIADLEMKLGEAGARTIGEFLADRQATNDTVRARRLSGTNALYEFYPDRYMLEQEFDTLWAKQAAFNPSLYIEAARERLKEIVFFQRKLKPQEVGRCIFLSDEDRISKALPSFQRFRIYQELSNLAWIDHDGVAHRITASLALRDHLFDELEHKKKLTFKAMRAILRKQGVVDYPVGFNLESDNRDHLIGNLTSCIMRDAKKMIGSAWDRLDEEEQDSFILMLQDDQKGDDEVRSILTQQYGLSDDVAEDCLDVRLPDGHGSLSKKAIDRILPVLRDQGLIYYDAVKEAGLGEANLYDPYAALSDKLDYYGKALAGHVMGASGKFEDSDEKRYGTISNPTVHIALNQVRAVVNELIRLHGKPDEVVIEIGRDLPMGADGKRELERFQKEGRAKNERARDELKKLGHIDSRESRQKFQLWEQLAKEPVDRCCPFTGKMMSISDLFSDKVEIEHLLPFSLTLDDSMANKTVCFRQANRDKGNRAPFDAFGNSPAGYDWQEILGRSQNLPYAKRWRFLPDAMKRFEADGGFLERQLNDTRYISRYTTEYISTIIPKNKIWVVTGRLTSLLRGFWGLNSILRGHNTDDGTPAKKSRDDHRHHAIDAIVVGMTSRGLLQKVSKAARRSEDLDLTRLFEGRIDPWDGFRDEVKKHIDAIIVSHRPRKKSQGALHNDTAYGIVEHAENGASTVVHRVPITSLGKQSDIEKVRDPLIKSALLNETAGLSGKSFENAVQKWCADNSIKSLRIVETVSIIPITDKEGVAYKGYKGDGNAYMDIYQDPTSSKWKGEIVSRFDANQKGFIPSWQSQFPTARLIMRLRINDLLKLQDGEIEEIYRVQRLSGSKILMAPHTEANVDARDRDKNDTFKLTSKSPGKLQSASARKVHISPTGLIREG

SEQ ID NO: 381 - protein, 1153 aa, Barnesiella intestinihominis
MKNILGLDLGLSSIGWSVIRENSEEQELVAMGSRVVSLTAAELSSFTQGNGVSINSQRTQKRTQRKGYDRYQLRRTLLRNKLDTLGMLPDDSLSYLPKLQLWGLRAKAVTQRIELNELGRVLLHLNQKRGYKSIKSDFSGDKKITDYVKTVKTRYDELKEMRLTIGELFFRRLTENAFFRCKEQVYPRQAYVEEFDCIMNCQRKFYPDILTDETIRCIRDEIIYYQRPLKSCKYLVSRCEFEKRFYLNAAGKKTEAGPKVSPRTSPLFQVCRLWESINNIVVKDRRNEIVFISAEQRAALFDFLNTHEKLKGSDLLKLLGLSKTYGYRLGEQFKTGIQGNKTRVEIERALGNYPDKKRLLQFNLQEESSSMVNTETGEIIPMISLSFEQEPLYRLWHVLYSIDDREQLQSVLRQKFGIDDDEVLERLSAIDLVKAGFGNKSSKAIRRILPFLQLGMNYAEACEAAGYNHSNNYTKAENEARALLDRLPAIKKNELRQPVVEKILNQMVNVVNALMEKYGRFDEIRVELARELKQSKEERSNTYKSINKNQRENEQIAKRIVEYGVPTRSRIQKYKMWEESKHCCIYCGQPVDVGDFLRGFDVEVEHIIPKSLYFDDSFANKVCSCRSCNKEKNNRTAYDYMKSKGEKALSDYVERVNTMYTNNQISKTKWQNLLTPVDKISIDFIDRQLRESQYIARKAKEILTSICYNVTATSGSVTSFLRHVWGWDTVLHDLNFDRYKKVGLTEVIEVNHRGSVIRREQIKDWSKRFDHRHHAIDALTIACTKQAYIQRLNNLRAEEGPDFNKMSLERYIQSQPHFSVAQVREAVDRILVSFRAGKRAVTPGKRYIRKNRKRISVQSVLIPRGALSEESVYGVIHVWEKDEQGHVIQKQRAVMKYPITSINREMLDKEKVVDKRIHRILSGRLAQYNDNPKEAFAKPVYIDKECRIPIRTVRCFAKPAINTLVPLKKDDKGNPVAWVNPGNNHHVAIYRDEDGKYKERTVTFWEAVDRCRVGIPAIVTQPDTIWDNILQRNDISENVLESLPDVKWQFVLSLQQNEMFILGMNEEDYRYAMDQQDYALLNKYLYRVQKLSKSDYSFRYHTETSVEDKYDGKPNLKLSMQMGKLKRVSIKSLLGLNPHKVHISVLGEIKEIS

SEQ ID NO: 382 - protein, 1062 aa, Ralstonia syzygii
MAEKQHRWGLDIGTNSIGWAVIALIEGRPAGLVATGSRIFSDGRNPKDGSSLAVERRGPRQMRRRRDRYLRRRDRFMQALINVGLMPGDAAARKALVTENPYVLRQRGLDQALTLPEFGRALFHLNQRRGFQSNRKTDRATAKESGKVKNAIAAFRAGMGNARTVGEALARRLEDGRPVRARMVGQGKDEHYELYIAREWIAQEFDALWASQQRFHAEVLADAARDRLRAILLFQRKLLPVPVGKCFLEPNQPRVAAALPSAQRFRLMQELNHLRVMTLADKRERPLSFQERNDLLAQLVARPKCGFDMLRKIVFGANKEAYRFTIESERRKELKGCDTAAKLAKVNALGTRWQALSLDEQDRLVCLLLDGENDAVLADALREHYGLTDAQIDTLLGLSFEDGHMRLGRSALLRVLDALESGRDEQGLPLSYDKAVVAAGYPAHTADLENGERDALPYYGELLWRYTQDAPTAKNDAERKFGKIANPTVHIGLNQLRKLVNALIQRYGKPAQIVVELARNLKAGLEEKERIKKQQTANLERNERIRQKLQDAGVPDNRENRLRMRLFEELGQGNGLGTPCIYSGRQISLQRLFSNDVQVDHILPFSKTLDDSFANKVLAQHDANRYKGNRGPFEAFGANRDGYAWDDIRARAAVLPRNKRNRFAETAMQDWLHNETDFLARQLTDTAYLSRVARQYLTAICSKDDVYVSPGRLTAMLRAKWGLNRVLDGVMEEQGRPAVKNRDDHRHHAIDAVVIGATDRAMLQQVATLAARAREQDAERLIGDMPTPWPNFLEDVRAAVARCVVSHKPDHGPEGGLHNDTAYGIVAGPFEDGRYRVRHRVSLFDLKPGDLSNVRCDAPLQAELEPIFEQDDARAREVALTALAERYRQRKVWLEELMSVLPIRPRGEDGKTLPDSAPYKAYKGDSNYCYELFINERGRWDGELISTFRANQAAYRRFRNDPARFRRYTAGGRPLLMRLCINDYIAVGTAAERTIFRVVKMSENKITLAEHFEGGTLKQRDADKDDPFKYLTKSPGALRDLGARRIFVDLIGRVLDPGIKGD

SEQ ID NO: 383 - protein, 1059 aa, Wolinella succinogenes
MIERILGVDLGISSLGWAIVEYDKDDEAANRIIDCGVRLFTAAETPKKKESPNKARREARGIRRVLNRRRVRMNMIKKLFLRAGLIQDVDLDGEGGMFYSKANRADVWELRHDGLYRLLKGDELARVLIHIAKHRGYKFIGDDEADEESGKVKKAGVVLRQNFEAAGCRTVGEWLWRERGANGKKRNKHGDYEISIHRDLLVEEVEAIFVAQQEMRSTIATDALKAAYREIAFFVRPMQRIEKMVGHCTYFPEERRAPKSAPTAEKFIAISKFFSTVIIDNEGWEQKIIERKTLEELLDFAVSREKVEFRHLRKFLDLSDNEIFKGLHYKGKPKTAKKREATLFDPNEPTELEFDKVEAEKKAWISLRGAAKLREALGNEFYGRFVALGKHADEATKILTYYKDEGQKRRELTKLPLEAEMVERLVKIGFSDFLKLSLKAIRDILPAMESGARYDEAVLMLGVPHKEKSAILPPLNKTDIDILNPTVIRAFAQFRKVANALVRKYGAFDRVHFELAREINTKGEIEDIKESQRKNEKERKEAADWIAETSFQVPLTRKNILKKRLYIQQDGRCAYTGDVIELERLFDEGYCEIDHILPRSRSADDSFANKVLCLARANQQKTDRTPYEWFGHDAARWNAFETRTSAPSNRVRTGKGKIDRLLKKNFDENSEMAFKDRNLNDTRYMARAIKTYCEQYWVFKNSHTKAPVQVRSGKLTSVLRYQWGLESKDRESHTHHAVDAIIIAFSTQGMVQKLSEYYRFKETHREKERPKLAVPLANFRDAVEEATRIENTETVKEGVEVKRLLISRPPRARVTGQAHEQTAKPYPRIKQVKNKKKWRLAPIDEEKFESFKADRVASANQKNFYETSTIPRVDVYHKKGKFHLVPIYLHEMVLNELPNLSLGTNPEAMDENFFKFSIFKDDLISIQTQGTPKKPAKIIMGYFKNMHGANMVLSSINNSPCEGFTCTPVSMDKKHKDKCKLCPEENRIAGRCLQGFLDYWSQEGLRPPRKEFECDQGVKFALDVKKYQIDPLGYYYEVKQEKRLGTIPQMRSAKKLVKK

SEQ ID NO: 384 - protein, 1269 aa, Mycoplasma gallisepticum
MNNSIKSKPEVTIGLDLGVGSVGWAIVDNETNIIHHLGSRLFSQAKTAEDRRSFRGVRRLIRRRKYKLKRFVNLIWKYNSYFGFKNKEDILNNYQEQQKLHNTVLNLKSEALNAKIDPKALSWILHDYLKNRGHFYEDNRDFNVYPTKELAKYFDKYGYYKGIIDSKEDNDNKLEEELTKYKFSNKHWLEEVKKVLSNQTGLPEKFKEEYESLFSYVRNYSEGPGSINSVSPYGIYHLDEKEGKVVQKYNNIWDKTIGKCNIFPDEYRAPKNSPIAMIFNEINELSTIRSYSIYLTGWFINQEFKKAYLNKLLDLLIKTNGEKPIDARQFKKLREETIAESIGKETLKDVENEEKLEKEDHKWKLKGLKLNTNGKIQYNDLSSLAKFVHKLKQHLKLDFLLEDQYATLDKINFLQSLFVYLGKHLRYSNRVDSANLKEFSDSNKLFERILQKQKDGLFKLFEQTDKDDEKILAQTHSLSTKAMLLAITRMTNLDNDEDNQKNNDKGWNFEAIKNFDQKFIDITKKNNNLSLKQNKRYLDDRFINDAILSPGVKRILREATKVFNAILKQFSEEYDVTKVVIELARELSEEKELENTKNYKKLIKKNGDKISEGLKALGISEDEIKDILKSPTKSYKFLLWLQQDHIDPYSLKEIAFDDIFTKTEKFEIDHIIPYSISFDDSSSNKLLVLAESNQAKSNQTPYEFISSGNAGIKWEDYEAYCRKFKDGDSSLLDSTQRSKKFAKMMKTDTSSKYDIGFLARNLNDTRYATIVFRDALEDYANNHLVEDKPMFKVVCINGSVTSFLRKNFDDSSYAKKDRDKNIHHAVDASIISIFSNETKTLFNQLTQFADYKLFKNTDGSWKKIDPKTGVVTEVTDENWKQIRVRNQVSEIAKVIEKYIQDSNIERKARYSRKIENKTNISLFNDTVYSAKKVGYEDQIKRKNLKTLDIHESAKENKNSKVKRQFVYRKLVNVSLLNNDKLADLFAEKEDILMYRANPWVINLAEQIFNEYTENKKIKSQNVFEKYMLDLTKEFPEKFSEFLVKSMLRNKTAIIYDDKKNIVHRIKRLKMLSSELKENKLSNVIIRSKNQSGTKLSYQDTINSLALMIMRSIDPTAKKQYIRVPLNTLNLHLGDHDFDLHNMDAYLKKPKFVKYLKANEIGDEYKPWRVLTSGTLLIHKKDKKLMYISSFQNLNDVIEIKNLIETEYKENDDSDSKKKKKANRFLMTLSTILNDYILLDAKDNFDILGLSKNRIDEILNSKLGLDKIVK

SEQ ID NO: 385 - protein, 1138 aa, Acidothermus cellulolyticus
MGGSEVGTVPVTWRLGVDVGERSIGLAAVSYEEDKPKEILAAVSWIHDGGVGDERSGASRLALRGMARRARRLRRFRRARLRDLDMLLSELGWTPLPDKNVSPVDAWLARKRLAEEYVVDETERRRLLGYAVSHMARHRGWRNPWTTIKDLKNLPQPSDSWERTRESLEARYSVSLEPGTVGQWAGYLLQRAPGIRLNPTQQSAGRRAELSNATAFETRLRQEDVLWELRCIADVQGLPEDVVSNVIDAVFCQKRPSVPAERIGRDPLDPSQLRASRACLEFQEYRIVAAVANLRIRDGSGSRPLSLEERNAVIEALLAQTERSLTWSDIALEILKLPNESDLTSVPEEDGPSSLAYSQFAPFDETSARIAEFIAKNRRKIPTFAQWWQEQDRTSRSDLVAALADNSIAGEEEQELLVHLPDAELEALEGLALPSGRVAYSRLTLSGLTRVMRDDGVDVHNARKTCFGVDDNWRPPLPALHEATGHPVVDRNLAILRKFLSSATMRWGPPQSIVVELARGASESRERQAEEEAARRAHRKANDRIRAELRASGLSDPSPADLVRARLLELYDCHCMYCGAPISWENSELDHIVPRTDGGSNRHENLAITCGACNKEKGRRPFASWAETSNRVQLRDVIDRVQKLKYSGNMYWTRDEFSRYKKSVVARLKRRTSDPEVIQSIESTGYAAVALRDRLLSYGEKNGVAQVAVFRGGVTAEARRWLDISIERLFSRVAIFAQSTSTKRLDRRHHAVDAVVLTTLTPGVAKTLADARSRRVSAEFWRRPSDVNRHSTEEPQSPAYRQWKESCSGLGDLLISTAARDSIAVAAPLRLRPTGALHEETLRAFSEHTVGAAWKGAELRRIVEPEVYAAFLALTDPGGRFLKVSPSEDVLPADENRHIVLSDRVLGPRDRVKLFPDDRGSIRVRGGAAYIASFHHARVFRWGSSHSPSFALLRVSLADLAVAGLLRDGVDVFTAELPPWTPAWRYASIALVKAVESGDAKQVGWLVPGDELDFGPEGVTTAAGDLSMFLKYFPERHWVVTGFEDDKRINLKPAFLSAEQAEVLRTERSDRPDTLTEAGEILAQFFPRCWRATVAKVLCHPGLTVIRRTALGQPRWRRGHLPYSWRPWSADPWSGGTP

SEQ ID NO: 386 - protein, 1265 aa, Mycoplasma ovipneumoniae
MHNKKNITIGFDLGIASIGWAIIDSTTSKILDWGTRTFEERKTANERRAFRSTRRNIRRKAYRNQRFINLILKYKDLFELKNISDIQRANKKDTENYEKIISFFTEIYKKCAAKHSNILEVKVKALDSKIEKLDLIWILHDYLENRGFFYDLEEENVADKYEGIEHPSILLYDFFKKNGFFKSNSSIPKDLGGYSFSNLQWVNEIKKLFEVQEINPEFSEKFLNLFTSVRDYAKGPGSEHSASEYGIFQKDEKGKVFKKYDNIWDKTIGKCSFFVEENRSPVNYPSYEIFNLLNQLINLSTDLKTTNKKIWQLSSNDRNELLDELLKVKEKAKIISISLKKNEIKKIILKDFGFEKSDIDDQDTIEGRKIIKEEPTTKLEVTKHLLATIYSHSSDSNWININNILEFLPYLDAICIILDREKSRGQDEVLKKLTEKNIFEVLKIDREKQLDFVKSIFSNTKFNFKKIGNFSLKAIREFLPKMFEQNKNSEYLKWKDEEIRRKWEEQKSKLGKTDKKTKYLNPRIFQDEIISPGTKNTFEQAVLVLNQIIKKYSKENIIDAIIIESPREKNDKKTIEEIKKRNKKGKGKTLEKLFQILNLENKGYKLSDLETKPAKLLDRLRFYHQQDGIDLYTLDKINIDQLINGSQKYEIEHIIPYSMSYDNSQANKILTEKAENLKKGKLIASEYIKRNGDEFYNKYYEKAKELFINKYKKNKKLDSYVDLDEDSAKNRFRFLTLQDYDEFQVEFLARNLNDTRYSTKLFYHALVEHFENNEFFTYIDENSSKHKVKISTIKGHVTKYFRAKPVQKNNGPNENLNNNKPEKIEKNRENNEHHAVDAAIVAIIGNKNPQIANLLTLADNKTDKKFLLHDENYKENIETGELVKIPKFEVDKLAKVEDLKKIIQEKYEEAKKHTAIKFSRKTRTILNGGLSDETLYGFKYDEKEDKYFKIIKKKLVTSKNEELKKYFENPFGKKADGKSEYTVLMAQSHLSEFNKLKEIFEKYNGFSNKTGNAFVEYMNDLALKEPTLKAEIESAKSVEKLLYYNFKPSDQFTYHDNINNKSFKRFYKNIRIIEYKSIPIKFKILSKHDGGKSFKDTLFSLYSLVYKVYENGKESYKSIPVTSQMRNFGIDEFDFLDENLYNKEKLDIYKSDFAKPIPVNCKPVFVLKKGSILKKKSLDIDDFKETKETEEGNYYFISTISKRFNRDTAYGLKPLKLSVVKPVAEPSTNPIFKEYIPIHLDELGNEYPVKIKEHTDDEKLMCTIK

SEQ ID NO: 387 - DNA, 22 bp, Artificial Sequence
  CEP290-11 targeting domain (DNA)
gacactgccaatagggataggt

SEQ ID NO: 388 - DNA, 22 bp, Artificial Sequence
  CEP290-64 targeting domain (DNA)
gtcaaaagctaccggttacctg

SEQ ID NO: 389 - DNA, 22 bp, Artificial Sequence
  CEP290-323 targeting domain (DNA)
gttctgtcctcagtaaaaggta

SEQ ID NO: 390 - DNA, 20 bp, Artificial Sequence
  CEP290-490 targeting domain (DNA)
gaatagtttgttctgggtac

SEQ ID NO: 391 - DNA, 20 bp, Artificial Sequence
  CEP290-492 targeting domain (DNA)
gagaaagggatgggcactta

SEQ ID NO: 392 - DNA, 20 bp, Artificial Sequence
  CEP290-496/-B115/-B1041/-85 targeting domain (DNA)
gatgcagaactagtgtagac

SEQ ID NO: 393 - DNA, 20 bp, Artificial Sequence
  CEP290-502/-B1055 targeting domain (DNA)
gtcacatgggagtcacaggg

SEQ ID NO: 394 - DNA, 19 bp, Artificial Sequence
  CEP290-504 targeting domain (DNA)
gagtatctcctgtttggca

SEQ ID NO: 395 - RNA, 20 nt, Artificial Sequence
  CEP290-B4/-B1000/-54 targeting domain (RNA)
gagauacucacaauuacaac

SEQ ID NO: 396 - RNA, 20 nt, Artificial Sequence
  CEP290-B28 targeting domain (RNA)
gauacucacaauuacaacug

SEQ ID NO: 397 - RNA, 17 nt, Artificial Sequence
  CEP290-B1001 targeting domain (RNA)
gauacucacaauuacaa

SEQ ID NO: 398 - RNA, 22 nt, Artificial Sequence
  CEP290-12 targeting domain (RNA)
gcaccuggccccaguuguaauu

SEQ ID NO: 399 - DNA, 25 bp, Artificial Sequence
  PCR primer ITR-Titer-fwd
aacatgctacgcagagagggagtgg

SEQ ID NO: 400 - DNA, 29 bp, Artificial Sequence
  PCR primer ITR-Titer-rev
catgagacaaggaacccctagtgatggag

SEQ ID NO: 401 - DNA, 617 bp, Artificial Sequence
  CMV promoter
cattgattattgactagttattaatagtaatcaattacggggtcattagttcatagcccatatatggagttccgcgttacataacttacggtaaatggcccgcctggctgaccgcccaacgacccccgcccattgacgtcaataatgacgtatgttcccatagtaacgccaatagggactttccattgacgtcaatgggtggactatttacggtaaactgcccacttggcagtacatcaagtgtatcatatgccaagtacgccccctattgacgtcaatgacggtaaatggcccgcctggcattatgcccagtacatgaccttatgggactttcctacttggcagtacatctacgtattagtcatcgctattaccatggtgatgcggttttggcagtacatcaatgggcgtggatagcggtttgactcacggggatttccaagtctccaccccattgacgtcaatgggagtttgttttggcaccaaaatcaacgggactttccaaaatgtcgtaacaactccgccccattgacgcaaatgggcggtaggcgtgtacggtgggaggtctatataagcagagctggtttagtgaaccgtcagatccgctagagatccgc

SEQ ID NO: 402 - DNA, 252 bp, Artificial Sequence
  EFS promoter
tcgagtggctccggtgcccgtcagtgggcagagcgcacatcgcccacagtccccgagaagttggggggaggggtcggcaattgaaccggtgcctagagaaggtggcgcggggtaaactgggaaagtgatgtcgtgtactggctccgcctttttcccgagggtgggggagaaccgtatataagtgcagtagtcgccgtgaacgttctttttcgcaacgggtttgccgccagaacacaggtgtcgtgaccgcgg

SEQ ID NO: 403 - DNA, 292 bp, Homo sapiens
gggccccagaagcctggtggttgtttgtccttctcaggggaaaagtgaggcggccccttggaggaaggggccgggcagaatgatctaatcggattccaagcagctcaggggattgtctttttctagcaccttcttgccactcctaagcgtcctccgtgaccccggctgggatttcgcctggtgctgtgtcagccccggtctcccaggggcttcccagtggtccccaggaaccctcgacagggcccggtctctctcgtccagcaagggcagggacgggccacaggccaagggc

SEQ ID NO: 404 - DNA, 113 bp, Homo sapiens
gcctgtagccttaatctctcctagcagggggtttgggggagggaggaggagaaagaaagggccccttatggctgagacacaatgacccagccacaaggagggattaccgggcg

SEQ ID NO: 405 - DNA, 281 bp, Homo sapiens
aggtaggaagtggcctttaactccatagaccctatttaaacagcttcggacaggtttaaacatctccttggataattcctagtatccctgttcccactcctactcagggatgatagctctaagaggtgttaggggattaggctgaaaatgtaggtcacccctcagccatctgggaactagaatgagtgagagaggagagaggggcagagacacacacattcgcatattaaggtgacgcgtgtggcctcgaacaccgagcgaccctgcagcgacccgcttaa

SEQ ID NO: 406 - DNA, 235 bp, Homo sapiens
attttaatctcactagggttctgggagcacccccccccaccgctcccgccctccacaaagctcctgggcccctcctcccttcaaggattgcgaagagctggtcgcaaatcctcctaagccaccagcatctcggtcttcagctcacaccagccttgagcccagcctgcggccaggggaccacgcacgtcccacccacccagcgactccccagccgctgcccactcttcctcactca

SEQ ID NO: 407 - DNA, 143 bp, Artificial Sequence
  AAV1 left ITR sequence
ttgcccactccctctctgcgcgctcgctcgctcggtggggcctgcggaccaaaggtccgcagacggcagagctctgctctgccggccccaccgagcgagcgagcgcgcagagagggagtgggcaactccatcactaggggtaa

SEQ ID NO: 408 - DNA, 145 bp, Artificial Sequence
  AAV2 left ITR sequence
ttggccactccctctctgcgcgctcgctcgctcactgaggccgggcgaccaaaggtcgcccgacgcccgggctttgcccgggcggcctcagtgagcgagcgagcgcgcagagagggagtggccaactccatcactaggggttcct

SEQ ID NO: 409 - DNA, 142 bp, Artificial Sequence
  AAV3B left ITR sequence
tggccactccctctatgcgcactcgctcgctcggtggggcctggcgaccaaaggtcgccagacggacgtgctttgcacgtccggccccaccgagcgagcgagtgcgcatagagggagtggccaactccatcactagaggtat

SEQ ID NO: 410 - DNA, 146 bp, Artificial Sequence
  AAV4 left ITR sequence
ttggccactccctctatgcgcgctcgctcactcactcggccctggagaccaaaggtctccagactgccggcctctggccggcagggccgagtgagtgagcgagcgcgcatagagggagtggccaactccatcatctaggtttgccc

SEQ ID NO: 411 - DNA, 155 bp, Artificial Sequence
  AAV5 left ITR sequence
ctctcccccctgtcgcgttcgctcgctcgctggctcgtttgggggggtggcagctcaaagagctgccagacgacggccctctggccgtcgcccccccaaacgagccagcgagcgagcgaacgcgacaggggggagagtgccacactctcaagcaa

SEQ ID NO: 412 - DNA, 143 bp, Artificial Sequence
  AAV6 left ITR sequence
atacccctagtgatggagttgcccactccctctatgcgcgctcgctcgctcggtggggccggcagagcagagctctgccgtctgcggacctttggtccgcaggccccaccgagcgagcgagcgcgcatagagggagtgggcaa

SEQ ID NO: 413 - DNA, 145 bp, Artificial Sequence
  AAV7 left ITR sequence
ttggccactccctctatgcgcgctcgctcgctcggtggggcctgcggaccaaaggtccgcagacggcagagctctgctctgccggccccaccgagcgagcgagcgcgcatagagggagtggccaactccatcactaggggtaccg

SEQ ID NO: 414 - DNA, 145 bp, Artificial Sequence
  AAV8 left ITR sequence
cagagagggagtggccaactccatcactaggggtagcgcgaagcgcctcccacgctgccgcgtcagcgctgacgtaaattacgtcataggggagtggtcctgtattagctgtcacgtgagtgcttttgcggcattttgcgacacc

SEQ ID NO: 415 - DNA, 145 bp, Artificial Sequence
  AAV9 left ITR sequence
cagagagggagtggccaactccatcactaggggtaatcgcgaagcgcctcccacgctgccgcgtcagcgctgacgtagattacgtcataggggagtggtcctgtattagctgtcacgtgagtgcttttgcgacattttgcgacac

SEQ ID NO: 416 - DNA, 19 bp, Artificial Sequence
  Spacer
cagatctgaattcggtacc

SEQ ID NO: 417 - DNA, 264 bp, Artificial Sequence
  Exemplary U6 promoter
aaggtcgggcaggaagagggcctatttcccatgattccttcatatttgcatatacgatacaaggctgttagagagataattagaattaatttgactgtaaacacaaagatattagtacaaaatacgtgacgtagaaagtaataatttcttgggtagtttgcagttttaaaattatgttttaaaatggactatcatatgcttaccgtaacttgaaagtatttcgatttcttggctttatatatcttgtggaaaggacgaaacacc

SEQ ID NO: 418 - DNA, 82 bp, Artificial Sequence
  Exemplary S. auerus gRNA scaffold
gttttagtactctggaaacagaatctactaaaacaaggcaaaatgccgtgtttatctcgtcaacttgttggcgagatttttt

SEQ ID NO: 419 - DNA, 50 bp, Artificial Sequence
  Spacer
ggtaccgctagcgcttaagtcgcgatgtacgggccagatatacgcgttga

SEQ ID NO: 420 - DNA, 30 bp, Artificial Sequence
  Exemplary N-ter NLS
ccgaagaaaaagcgcaaggtcgaagcgtcc

SEQ ID NO: 421 - skipped

SEQ ID NO: 422 - DNA, 21 bp, Artificial Sequence
  Exemplary C-ter NLS
cccaagaagaagaggaaagtc

SEQ ID NO: 423 - DNA, 66 bp, Artificial Sequence
  Exemplary 3x FLAG
gactacaaagaccatgacggtgattataaagatcatgacatcgattacaaggatgacgatgacaag

SEQ ID NO: 424 - DNA, 60 bp, Artificial Sequence
  Mini polyA
tagcaataaaggatcgtttattttcattggaagcgtgtgttggttttttgatcaggcgcg

SEQ ID NO: 425 - DNA, 86 bp, Artificial Sequence
  Spacer
tccaagcttcgcaggaaagaacatgtgagcaaaaggccagcaaaaggcgttaactctagatttaaatgcatgctggggagagatct

SEQ ID NO: 426 - protein, 22 aa, Artificial Sequence
  Exemplary 3x FLAG
DYKDHDGDYKDHDIDYKDDDDK

SEQ ID NO: 427 - DNA, 20 bp, Artificial Sequence
  Spacer
cgacttagttcgatcgaagg

SEQ ID NO: 428 - DNA, 5217 bp, Artificial Sequence
  Exemplary recombinant AAV genome containing CMV promoter (5'->3' upper strand)
  misc_feature (429)..(454): a, c, g, or t
  misc_feature (821)..(846): a, c, g, or t
ttggccactccctctctgcgcgctcgctcgctcactgaggccgggcgaccaaaggtcgcccgacgcccgggctttgcccgggcggcctcagtgagcgagcgagcgcgcagagagggagtggccaactccatcactaggggttcctcagatctgaattcggtaccaaggtcgggcaggaagagggcctatttcccatgattccttcatatttgcatatacgatacaaggctgttagagagataattagaattaatttgactgtaaacacaaagatattagtacaaaatacgtgacgtagaaagtaataatttcttgggtagtttgcagttttaaaattatgttttaaaatggactatcatatgcttaccgtaacttgaaagtatttcgatttcttggctttatatatcttgtggaaaggacgaaacaccnnnnnnnnnnnnnnnnnnnnnnnnnngttttagtactctggaaacagaatctactaaaacaaggcaaaatgccgtgtttatctcgtcaacttgttggcgagattttttcgacttagttcgatcgaaggaaggtcgggcaggaagagggcctatttcccatgattccttcatatttgcatatacgatacaaggctgttagagagataattagaattaatttgactgtaaacacaaagatattagtacaaaatacgtgacgtagaaagtaataatttcttgggtagtttgcagttttaaaattatgttttaaaatggactatcatatgcttaccgtaacttgaaagtatttcgatttcttggctttatatatcttgtggaaaggacgaaacaccnnnnnnnnnnnnnnnnnnnnnnnnnngttttagtactctggaaacagaatctactaaaacaaggcaaaatgccgtgtttatctcgtcaacttgttggcgagattttttggtaccgctagcgcttaagtcgcgatgtacgggccagatatacgcgttgacattgattattgactagttattaatagtaatcaattacggggtcattagttcatagcccatatatggagttccgcgttacataacttacggtaaatggcccgcctggctgaccgcccaacgacccccgcccattgacgtcaataatgacgtatgttcccatagtaacgccaatagggactttccattgacgtcaatgggtggactatttacggtaaactgcccacttggcagtacatcaagtgtatcatatgccaagtacgccccctattgacgtcaatgacggtaaatggcccgcctggcattatgcccagtacatgaccttatgggactttcctacttggcagtacatctacgtattagtcatcgctattaccatggtgatgcggttttggcagtacatcaatgggcgtggatagcggtttgactcacggggatttccaagtctccaccccattgacgtcaatgggagtttgttttggcaccaaaatcaacgggactttccaaaatgtcgtaacaactccgccccattgacgcaaatgggcggtaggcgtgtacggtgggaggtctatataagcagagctggtttagtgaaccgtcagatccgctagagatccgcgcggccgctaatacgactcactatagggagagccgccaccatgccgaagaaaaagcgcaaggtcgaagcgtccatgaaaaggaactacattctggggctggacatcgggattacaagcgtggggtatgggattattgactatgaaacaagggacgtgatcgacgcaggcgtcagactgttcaaggaggccaacgtggaaaacaatgagggacggagaagcaagaggggagccaggcgcctgaaacgacggagaaggcacagaatccagagggtgaagaaactgctgttcgattacaacctgctgaccgaccattctgagctgagtggaattaatccttatgaagccagggtgaaaggcctgagtcagaagctgtcagaggaagagttttccgcagctctgctgcacctggctaagcgccgaggagtgcataacgtcaatgaggtggaagaggacaccggcaacgagctgtctacaaaggaacagatctcacgcaatagcaaagctctggaagagaagtatgtcgcagagctgcagctggaacggctgaagaaagatggcgaggtgagagggtcaattaataggttcaagacaagcgactacgtcaaagaagccaagcagctgctgaaagtgcagaaggcttaccaccagctggatcagagcttcatcgatacttatatcgacctgctggagactcggagaacctactatgagggaccaggagaagggagccccttcggatggaaagacatcaaggaatggtacgagatgctgatgggacattgcacctattttccagaagagctgagaagcgtcaagtacgcttataacgcagatctgtacaacgccctgaatgacctgaacaacctggtcatcaccagggatgaaaacgagaaactggaatactatgagaagttccagatcatcgaaaacgtgtttaagcagaagaaaaagcctacactgaaacagattgctaaggagatcctggtcaacgaagaggacatcaagggctaccgggtgacaagcactggaaaaccagagttcaccaatctgaaagtgtatcacgatattaaggacatcacagcacggaaagaaatcattgagaacgccgaactgctggatcagattgctaagatcctgactatctaccagagctccgaggacatccaggaagagctgactaacctgaacagcgagctgacccaggaagagatcgaacagattagtaatctgaaggggtacaccggaacacacaacctgtccctgaaagctatcaatctgattctggatgagctgtggcatacaaacgacaatcagattgcaatctttaaccggctgaagctggtcccaaaaaaggtggacctgagtcagcagaaagagatcccaaccacactggtggacgatttcattctgtcacccgtggtcaagcggagcttcatccagagcatcaaagtgatcaacgccatcatcaagaagtacggcctgcccaatgatatcattatcgagctggctagggagaagaacagcaaggacgcacagaagatgatcaatgagatgcagaaacgaaaccggcagaccaatgaacgcattgaagagattatccgaactaccgggaaagagaacgcaaagtacctgattgaaaaaatcaagctgcacgatatgcaggagggaaagtgtctgtattctctggaggccatccccctggaggacctgctgaacaatccattcaactacgaggtcgatcatattatccccagaagcgtgtccttcgacaattcctttaacaacaaggtgctggtcaagcaggaagagaactctaaaaagggcaataggactcctttccagtacctgtctagttcagattccaagatctcttacgaaacctttaaaaagcacattctgaatctggccaaaggaaagggccgcatcagcaagaccaaaaaggagtacctgctggaagagcgggacatcaacagattctccgtccagaaggattttattaaccggaatctggtggacacaagatacgctactcgcggcctgatgaatctgctgcgatcctatttccgggtgaacaatctggatgtgaaagtcaagtccatcaacggcgggttcacatcttttctgaggcgcaaatggaagtttaaaaaggagcgcaacaaagggtacaagcaccatgccgaagatgctctgattatcgcaaatgccgacttcatctttaaggagtggaaaaagctggacaaagccaagaaagtgatggagaaccagatgttcgaagagaagcaggccgaatctatgcccgaaatcgagacagaacaggagtacaaggagattttcatcactcctcaccagatcaagcatatcaaggatttcaaggactacaagtactctcaccgggtggataaaaagcccaacagagagctgatcaatgacaccctgtatagtacaagaaaagacgataaggggaataccctgattgtgaacaatctgaacggactgtacgacaaagataatgacaagctgaaaaagctgatcaacaaaagtcccgagaagctgctgatgtaccaccatgatcctcagacatatcagaaactgaagctgattatggagcagtacggcgacgagaagaacccactgtataagtactatgaagagactgggaactacctgaccaagtatagcaaaaaggataatggccccgtgatcaagaagatcaagtactatgggaacaagctgaatgcccatctggacatcacagacgattaccctaacagtcgcaacaaggtggtcaagctgtcactgaagccatacagattcgatgtctatctggacaacggcgtgtataaatttgtgactgtcaagaatctggatgtcatcaaaaaggagaactactatgaagtgaatagcaagtgctacgaagaggctaaaaagctgaaaaagattagcaaccaggcagagttcatcgcctccttttacaacaacgacctgattaagatcaatggcgaactgtatagggtcatcggggtgaacaatgatctgctgaaccgcattgaagtgaatatgattgacatcacttaccgagagtatctggaaaacatgaatgataagcgcccccctcgaattatcaaaacaattgcctctaagactcagagtatcaaaaagtactcaaccgacattctgggaaacctgtatgaggtgaagagcaaaaagcaccctcagattatcaaaaagggcggatcccccaagaagaagaggaaagtctcgagcgactacaaagaccatgacggtgattataaagatcatgacatcgattacaaggatgacgatgacaagtagcaataaaggatcgtttattttcattggaagcgtgtgttggttttttgatcaggcgcgtccaagcttcgcaggaaagaacatgtgagcaaaaggccagcaaaaggcgttaactctagatttaaatgcatgctggggagagatctaggaacccctagtgatggagttggccactccctctctgcgcgctcgctcgctcactgaggccgcccgggcaaagcccgggcgtcgggcgacctttggtcgcccggcctcagtgagcgagcgagcgcgcagagagggagtggccaa

SEQ ID NO: 429 - DNA, 4870 bp, Artificial Sequence
  Exemplary recombinant AAV genome containing EFS promoter (5'->3' upper strand)
  misc_feature (429)..(454): a, c, g, or t
  misc_feature (821)..(846): a, c, g, or t
ttggccactccctctctgcgcgctcgctcgctcactgaggccgggcgaccaaaggtcgcccgacgcccgggctttgcccgggcggcctcagtgagcgagcgagcgcgcagagagggagtggccaactccatcactaggggttcctcagatctgaattcggtaccaaggtcgggcaggaagagggcctatttcccatgattccttcatatttgcatatacgatacaaggctgttagagagataattagaattaatttgactgtaaacacaaagatattagtacaaaatacgtgacgtagaaagtaataatttcttgggtagtttgcagttttaaaattatgttttaaaatggactatcatatgcttaccgtaacttgaaagtatttcgatttcttggctttatatatcttgtggaaaggacgaaacaccnnnnnnnnnnnnnnnnnnnnnnnnnngttttagtactctggaaacagaatctactaaaacaaggcaaaatgccgtgtttatctcgtcaacttgttggcgagattttttcgacttagttcgatcgaaggaaggtcgggcaggaagagggcctatttcccatgattccttcatatttgcatatacgatacaaggctgttagagagataattagaattaatttgactgtaaacacaaagatattagtacaaaatacgtgacgtagaaagtaataatttcttgggtagtttgcagttttaaaattatgttttaaaatggactatcatatgcttaccgtaacttgaaagtatttcgatttcttggctttatatatcttgtggaaaggacgaaacaccnnnnnnnnnnnnnnnnnnnnnnnnnngttttagtactctggaaacagaatctactaaaacaaggcaaaatgccgtgtttatctcgtcaacttgttggcgagattttttggtaccgctagcgcttaagtcgcgatgtacgggccagatatacgcgttgacattgattattgactagttcgagtggctccggtgcccgtcagtgggcagagcgcacatcgcccacagtccccgagaagttggggggaggggtcggcaattgaaccggtgcctagagaaggtggcgcggggtaaactgggaaagtgatgtcgtgtactggctccgcctttttcccgagggtgggggagaaccgtatataagtgcagtagtcgccgtgaacgttctttttcgcaacgggtttgccgccagaacacaggtgtcgtgaccgcgggcggccgctaatacgactcactatagggagagccgccaccatgccgaagaaaaagcgcaaggtcgaagcgtccatgaaaaggaactacattctggggctggacatcgggattacaagcgtggggtatgggattattgactatgaaacaagggacgtgatcgacgcaggcgtcagactgttcaaggaggccaacgtggaaaacaatgagggacggagaagcaagaggggagccaggcgcctgaaacgacggagaaggcacagaatccagagggtgaagaaactgctgttcgattacaacctgctgaccgaccattctgagctgagtggaattaatccttatgaagccagggtgaaaggcctgagtcagaagctgtcagaggaagagttttccgcagctctgctgcacctggctaagcgccgaggagtgcataacgtcaatgaggtggaagaggacaccggcaacgagctgtctacaaaggaacagatctcacgcaatagcaaagctctggaagagaagtatgtcgcagagctgcagctggaacggctgaagaaagatggcgaggtgagagggtcaattaataggttcaagacaagcgactacgtcaaagaagccaagcagctgctgaaagtgcagaaggcttaccaccagctggatcagagcttcatcgatacttatatcgacctgctggagactcggagaacctactatgagggaccaggagaagggagccccttcggatggaaagacatcaaggaatggtacgagatgctgatgggacattgcacctattttccagaagagctgagaagcgtcaagtacgcttataacgcagatctgtacaacgccctgaatgacctgaacaacctggtcatcaccagggatgaaaacgagaaactggaatactatgagaagttccagatcatcgaaaacgtgtttaagcagaagaaaaagcctacactgaaacagattgctaaggagatcctggtcaacgaagaggacatcaagggctaccgggtgacaagcactggaaaaccagagttcaccaatctgaaagtgtatcacgatattaaggacatcacagcacggaaagaaatcattgagaacgccgaactgctggatcagattgctaagatcctgactatctaccagagctccgaggacatccaggaagagctgactaacctgaacagcgagctgacccaggaagagatcgaacagattagtaatctgaaggggtacaccggaacacacaacctgtccctgaaagctatcaatctgattctggatgagctgtggcatacaaacgacaatcagattgcaatctttaaccggctgaagctggtcccaaaaaaggtggacctgagtcagcagaaagagatcccaaccacactggtggacgatttcattctgtcacccgtggtcaagcggagcttcatccagagcatcaaagtgatcaacgccatcatcaagaagtacggcctgcccaatgatatcattatcgagctggctagggagaagaacagcaaggacgcacagaagatgatcaatgagatgcagaaacgaaaccggcagaccaatgaacgcattgaagagattatccgaactaccgggaaagagaacgcaaagtacctgattgaaaaaatcaagctgcacgatatgcaggagggaaagtgtctgtattctctggaggccatccccctggaggacctgctgaacaatccattcaactacgaggtcgatcatattatccccagaagcgtgtccttcgacaattcctttaacaacaaggtgctggtcaagcaggaagagaactctaaaaagggcaataggactcctttccagtacctgtctagttcagattccaagatctcttacgaaacctttaaaaagcacattctgaatctggccaaaggaaagggccgcatcagcaagaccaaaaaggagtacctgctggaagagcgggacatcaacagattctccgtccagaaggattttattaaccggaatctggtggacacaagatacgctactcgcggcctgatgaatctgctgcgatcctatttccgggtgaacaatctggatgtgaaagtcaagtccatcaacggcgggttcacatcttttctgaggcgcaaatggaagtttaaaaaggagcgcaacaaagggtacaagcaccatgccgaagatgctctgattatcgcaaatgccgacttcatctttaaggagtggaaaaagctggacaaagccaagaaagtgatggagaaccagatgttcgaagagaagcaggccgaatctatgcccgaaatcgagacagaacaggagtacaaggagattttcatcactcctcaccagatcaagcatatcaaggatttcaaggactacaagtactctcaccgggtggataaaaagcccaacagagagctgatcaatgacaccctgtatagtacaagaaaagacgataaggggaataccctgattgtgaacaatctgaacggactgtacgacaaagataatgacaagctgaaaaagctgatcaacaaaagtcccgagaagctgctgatgtaccaccatgatcctcagacatatcagaaactgaagctgattatggagcagtacggcgacgagaagaacccactgtataagtactatgaagagactgggaactacctgaccaagtatagcaaaaaggataatggccccgtgatcaagaagatcaagtactatgggaacaagctgaatgcccatctggacatcacagacgattaccctaacagtcgcaacaaggtggtcaagctgtcactgaagccatacagattcgatgtctatctggacaacggcgtgtataaatttgtgactgtcaagaatctggatgtcatcaaaaaggagaactactatgaagtgaatagcaagtgctacgaagaggctaaaaagctgaaaaagattagcaaccaggcagagttcatcgcctccttttacaacaacgacctgattaagatcaatggcgaactgtatagggtcatcggggtgaacaatgatctgctgaaccgcattgaagtgaatatgattgacatcacttaccgagagtatctggaaaacatgaatgataagcgcccccctcgaattatcaaaacaattgcctctaagactcagagtatcaaaaagtactcaaccgacattctgggaaacctgtatgaggtgaagagcaaaaagcaccctcagattatcaaaaagggcggatcccccaagaagaagaggaaagtctcgagcgactacaaagaccatgacggtgattataaagatcatgacatcgattacaaggatgacgatgacaagtagcaataaaggatcgtttattttcattggaagcgtgtgttggttttttgatcaggcgcgtccaagcttcgcaggaaagaacatgtgagcaaaaggccagcaaaaggcgttaactctagatttaaatgcatgctggggagagatctaggaacccctagtgatggagttggccactccctctctgcgcgctcgctcgctcactgaggccgcccgggcaaagcccgggcgtcgggcgacctttggtcgcccggcctcagtgagcgagcgagcgcgcagagagggagtggccaa

SEQ ID NO: 430 - DNA, 4910 bp, Artificial Sequence
  Exemplary recombinant AAV genome containing CRK1 promoter (5'->3' upper strand)
  misc_feature (429)..(454): a, c, g, or t
  misc_feature (821)..(846): a, c, g, or t
ttggccactccctctctgcgcgctcgctcgctcactgaggccgggcgaccaaaggtcgcccgacgcccgggctttgcccgggcggcctcagtgagcgagcgagcgcgcagagagggagtggccaactccatcactaggggttcctcagatctgaattcggtaccaaggtcgggcaggaagagggcctatttcccatgattccttcatatttgcatatacgatacaaggctgttagagagataattagaattaatttgactgtaaacacaaagatattagtacaaaatacgtgacgtagaaagtaataatttcttgggtagtttgcagttttaaaattatgttttaaaatggactatcatatgcttaccgtaacttgaaagtatttcgatttcttggctttatatatcttgtggaaaggacgaaacaccnnnnnnnnnnnnnnnnnnnnnnnnnngttttagtactctggaaacagaatctactaaaacaaggcaaaatgccgtgtttatctcgtcaacttgttggcgagattttttcgacttagttcgatcgaaggaaggtcgggcaggaagagggcctatttcccatgattccttcatatttgcatatacgatacaaggctgttagagagataattagaattaatttgactgtaaacacaaagatattagtacaaaatacgtgacgtagaaagtaataatttcttgggtagtttgcagttttaaaattatgttttaaaatggactatcatatgcttaccgtaacttgaaagtatttcgatttcttggctttatatatcttgtggaaaggacgaaacaccnnnnnnnnnnnnnnnnnnnnnnnnnngttttagtactctggaaacagaatctactaaaacaaggcaaaatgccgtgtttatctcgtcaacttgttggcgagattttttggtaccgctagcgcttaagtcgcgatgtacgggccagatatacgcgttgacattgattattgactagtgggccccagaagcctggtggttgtttgtccttctcaggggaaaagtgaggcggccccttggaggaaggggccgggcagaatgatctaatcggattccaagcagctcaggggattgtctttttctagcaccttcttgccactcctaagcgtcctccgtgaccccggctgggatttcgcctggtgctgtgtcagccccggtctcccaggggcttcccagtggtccccaggaaccctcgacagggcccggtctctctcgtccagcaagggcagggacgggccacaggccaagggcgcggccgctaatacgactcactatagggagagccgccaccatgccgaagaaaaagcgcaaggtcgaagcgtccatgaaaaggaactacattctggggctggacatcgggattacaagcgtggggtatgggattattgactatgaaacaagggacgtgatcgacgcaggcgtcagactgttcaaggaggccaacgtggaaaacaatgagggacggagaagcaagaggggagccaggcgcctgaaacgacggagaaggcacagaatccagagggtgaagaaactgctgttcgattacaacctgctgaccgaccattctgagctgagtggaattaatccttatgaagccagggtgaaaggcctgagtcagaagctgtcagaggaagagttttccgcagctctgctgcacctggctaagcgccgaggagtgcataacgtcaatgaggtggaagaggacaccggcaacgagctgtctacaaaggaacagatctcacgcaatagcaaagctctggaagagaagtatgtcgcagagctgcagctggaacggctgaagaaagatggcgaggtgagagggtcaattaataggttcaagacaagcgactacgtcaaagaagccaagcagctgctgaaagtgcagaaggcttaccaccagctggatcagagcttcatcgatacttatatcgacctgctggagactcggagaacctactatgagggaccaggagaagggagccccttcggatggaaagacatcaaggaatggtacgagatgctgatgggacattgcacctattttccagaagagctgagaagcgtcaagtacgcttataacgcagatctgtacaacgccctgaatgacctgaacaacctggtcatcaccagggatgaaaacgagaaactggaatactatgagaagttccagatcatcgaaaacgtgtttaagcagaagaaaaagcctacactgaaacagattgctaaggagatcctggtcaacgaagaggacatcaagggctaccgggtgacaagcactggaaaaccagagttcaccaatctgaaagtgtatcacgatattaaggacatcacagcacggaaagaaatcattgagaacgccgaactgctggatcagattgctaagatcctgactatctaccagagctccgaggacatccaggaagagctgactaacctgaacagcgagctgacccaggaagagatcgaacagattagtaatctgaaggggtacaccggaacacacaacctgtccctgaaagctatcaatctgattctggatgagctgtggcatacaaacgacaatcagattgcaatctttaaccggctgaagctggtcccaaaaaaggtggacctgagtcagcagaaagagatcccaaccacactggtggacgatttcattctgtcacccgtggtcaagcggagcttcatccagagcatcaaagtgatcaacgccatcatcaagaagtacggcctgcccaatgatatcattatcgagctggctagggagaagaacagcaaggacgcacagaagatgatcaatgagatgcagaaacgaaaccggcagaccaatgaacgcattgaagagattatccgaactaccgggaaagagaacgcaaagtacctgattgaaaaaatcaagctgcacgatatgcaggagggaaagtgtctgtattctctggaggccatccccctggaggacctgctgaacaatccattcaactacgaggtcgatcatattatccccagaagcgtgtccttcgacaattcctttaacaacaaggtgctggtcaagcaggaagagaactctaaaaagggcaataggactcctttccagtacctgtctagttcagattccaagatctcttacgaaacctttaaaaagcacattctgaatctggccaaaggaaagggccgcatcagcaagaccaaaaaggagtacctgctggaagagcgggacatcaacagattctccgtccagaaggattttattaaccggaatctggtggacacaagatacgctactcgcggcctgatgaatctgctgcgatcctatttccgggtgaacaatctggatgtgaaagtcaagtccatcaacggcgggttcacatcttttctgaggcgcaaatggaagtttaaaaaggagcgcaacaaagggtacaagcaccatgccgaagatgctctgattatcgcaaatgccgacttcatctttaaggagtggaaaaagctggacaaagccaagaaagtgatggagaaccagatgttcgaagagaagcaggccgaatctatgcccgaaatcgagacagaacaggagtacaaggagattttcatcactcctcaccagatcaagcatatcaaggatttcaaggactacaagtactctcaccgggtggataaaaagcccaacagagagctgatcaatgacaccctgtatagtacaagaaaagacgataaggggaataccctgattgtgaacaatctgaacggactgtacgacaaagataatgacaagctgaaaaagctgatcaacaaaagtcccgagaagctgctgatgtaccaccatgatcctcagacatatcagaaactgaagctgattatggagcagtacggcgacgagaagaacccactgtataagtactatgaagagactgggaactacctgaccaagtatagcaaaaaggataatggccccgtgatcaagaagatcaagtactatgggaacaagctgaatgcccatctggacatcacagacgattaccctaacagtcgcaacaaggtggtcaagctgtcactgaagccatacagattcgatgtctatctggacaacggcgtgtataaatttgtgactgtcaagaatctggatgtcatcaaaaaggagaactactatgaagtgaatagcaagtgctacgaagaggctaaaaagctgaaaaagattagcaaccaggcagagttcatcgcctccttttacaacaacgacctgattaagatcaatggcgaactgtatagggtcatcggggtgaacaatgatctgctgaaccgcattgaagtgaatatgattgacatcacttaccgagagtatctggaaaacatgaatgataagcgcccccctcgaattatcaaaacaattgcctctaagactcagagtatcaaaaagtactcaaccgacattctgggaaacctgtatgaggtgaagagcaaaaagcaccctcagattatcaaaaagggcggatcccccaagaagaagaggaaagtctcgagcgactacaaagaccatgacggtgattataaagatcatgacatcgattacaaggatgacgatgacaagtagcaataaaggatcgtttattttcattggaagcgtgtgttggttttttgatcaggcgcgtccaagcttcgcaggaaagaacatgtgagcaaaaggccagcaaaaggcgttaactctagatttaaatgcatgctggggagagatctaggaacccctagtgatggagttggccactccctctctgcgcgctcgctcgctcactgaggccgcccgggcaaagcccgggcgtcgggcgacctttggtcgcccggcctcagtgagcgagcgagcgcgcagagagggagtggccaa

SEQ ID NO: 431 - DNA, 4731 bp, Artificial Sequence
  Exemplary recombinant AAV genome containing CRX promoter (5'->3' upper strand)
  misc_feature (429)..(454): a, c, g, or t
  misc_feature (821)..(846): a, c, g, or t
ttggccactccctctctgcgcgctcgctcgctcactgaggccgggcgaccaaaggtcgcccgacgcccgggctttgcccgggcggcctcagtgagcgagcgagcgcgcagagagggagtggccaactccatcactaggggttcctcagatctgaattcggtaccaaggtcgggcaggaagagggcctatttcccatgattccttcatatttgcatatacgatacaaggctgttagagagataattagaattaatttgactgtaaacacaaagatattagtacaaaatacgtgacgtagaaagtaataatttcttgggtagtttgcagttttaaaattatgttttaaaatggactatcatatgcttaccgtaacttgaaagtatttcgatttcttggctttatatatcttgtggaaaggacgaaacaccnnnnnnnnnnnnnnnnnnnnnnnnnngttttagtactctggaaacagaatctactaaaacaaggcaaaatgccgtgtttatctcgtcaacttgttggcgagattttttcgacttagttcgatcgaaggaaggtcgggcaggaagagggcctatttcccatgattccttcatatttgcatatacgatacaaggctgttagagagataattagaattaatttgactgtaaacacaaagatattagtacaaaatacgtgacgtagaaagtaataatttcttgggtagtttgcagttttaaaattatgttttaaaatggactatcatatgcttaccgtaacttgaaagtatttcgatttcttggctttatatatcttgtggaaaggacgaaacaccnnnnnnnnnnnnnnnnnnnnnnnnnngttttagtactctggaaacagaatctactaaaacaaggcaaaatgccgtgtttatctcgtcaacttgttggcgagattttttggtaccgctagcgcttaagtcgcgatgtacgggccagatatacgcgttgacattgattattgactagtgcctgtagccttaatctctcctagcagggggtttgggggagggaggaggagaaagaaagggccccttatggctgagacacaatgacccagccacaaggagggattaccgggcggcggccgctaatacgactcactatagggagagccgccaccatgccgaagaaaaagcgcaaggtcgaagcgtccatgaaaaggaactacattctggggctggacatcgggattacaagcgtggggtatgggattattgactatgaaacaagggacgtgatcgacgcaggcgtcagactgttcaaggaggccaacgtggaaaacaatgagggacggagaagcaagaggggagccaggcgcctgaaacgacggagaaggcacagaatccagagggtgaagaaactgctgttcgattacaacctgctgaccgaccattctgagctgagtggaattaatccttatgaagccagggtgaaaggcctgagtcagaagctgtcagaggaagagttttccgcagctctgctgcacctggctaagcgccgaggagtgcataacgtcaatgaggtggaagaggacaccggcaacgagctgtctacaaaggaacagatctcacgcaatagcaaagctctggaagagaagtatgtcgcagagctgcagctggaacggctgaagaaagatggcgaggtgagagggtcaattaataggttcaagacaagcgactacgtcaaagaagccaagcagctgctgaaagtgcagaaggcttaccaccagctggatcagagcttcatcgatacttatatcgacctgctggagactcggagaacctactatgagggaccaggagaagggagccccttcggatggaaagacatcaaggaatggtacgagatgctgatgggacattgcacctattttccagaagagctgagaagcgtcaagtacgcttataacgcagatctgtacaacgccctgaatgacctgaacaacctggtcatcaccagggatgaaaacgagaaactggaatactatgagaagttccagatcatcgaaaacgtgtttaagcagaagaaaaagcctacactgaaacagattgctaaggagatcctggtcaacgaagaggacatcaagggctaccgggtgacaagcactggaaaaccagagttcaccaatctgaaagtgtatcacgatattaaggacatcacagcacggaaagaaatcattgagaacgccgaactgctggatcagattgctaagatcctgactatctaccagagctccgaggacatccaggaagagctgactaacctgaacagcgagctgacccaggaagagatcgaacagattagtaatctgaaggggtacaccggaacacacaacctgtccctgaaagctatcaatctgattctggatgagctgtggcatacaaacgacaatcagattgcaatctttaaccggctgaagctggtcccaaaaaaggtggacctgagtcagcagaaagagatcccaaccacactggtggacgatttcattctgtcacccgtggtcaagcggagcttcatccagagcatcaaagtgatcaacgccatcatcaagaagtacggcctgcccaatgatatcattatcgagctggctagggagaagaacagcaaggacgcacagaagatgatcaatgagatgcagaaacgaaaccggcagaccaatgaacgcattgaagagattatccgaactaccgggaaagagaacgcaaagtacctgattgaaaaaatcaagctgcacgatatgcaggagggaaagtgtctgtattctctggaggccatccccctggaggacctgctgaacaatccattcaactacgaggtcgatcatattatccccagaagcgtgtccttcgacaattcctttaacaacaaggtgctggtcaagcaggaagagaactctaaaaagggcaataggactcctttccagtacctgtctagttcagattccaagatctcttacgaaacctttaaaaagcacattctgaatctggccaaaggaaagggccgcatcagcaagaccaaaaaggagtacctgctggaagagcgggacatcaacagattctccgtccagaaggattttattaaccggaatctggtggacacaagatacgctactcgcggcctgatgaatctgctgcgatcctatttccgggtgaacaatctggatgtgaaagtcaagtccatcaacggcgggttcacatcttttctgaggcgcaaatggaagtttaaaaaggagcgcaacaaagggtacaagcaccatgccgaagatgctctgattatcgcaaatgccgacttcatctttaaggagtggaaaaagctggacaaagccaagaaagtgatggagaaccagatgttcgaagagaagcaggccgaatctatgcccgaaatcgagacagaacaggagtacaaggagattttcatcactcctcaccagatcaagcatatcaaggatttcaaggactacaagtactctcaccgggtggataaaaagcccaacagagagctgatcaatgacaccctgtatagtacaagaaaagacgataaggggaataccctgattgtgaacaatctgaacggactgtacgacaaagataatgacaagctgaaaaagctgatcaacaaaagtcccgagaagctgctgatgtaccaccatgatcctcagacatatcagaaactgaagctgattatggagcagtacggcgacgagaagaacccactgtataagtactatgaagagactgggaactacctgaccaagtatagcaaaaaggataatggccccgtgatcaagaagatcaagtactatgggaacaagctgaatgcccatctggacatcacagacgattaccctaacagtcgcaacaaggtggtcaagctgtcactgaagccatacagattcgatgtctatctggacaacggcgtgtataaatttgtgactgtcaagaatctggatgtcatcaaaaaggagaactactatgaagtgaatagcaagtgctacgaagaggctaaaaagctgaaaaagattagcaaccaggcagagttcatcgcctccttttacaacaacgacctgattaagatcaatggcgaactgtatagggtcatcggggtgaacaatgatctgctgaaccgcattgaagtgaatatgattgacatcacttaccgagagtatctggaaaacatgaatgataagcgcccccctcgaattatcaaaacaattgcctctaagactcagagtatcaaaaagtactcaaccgacattctgggaaacctgtatgaggtgaagagcaaaaagcaccctcagattatcaaaaagggcggatcccccaagaagaagaggaaagtctcgagcgactacaaagaccatgacggtgattataaagatcatgacatcgattacaaggatgacgatgacaagtagcaataaaggatcgtttattttcattggaagcgtgtgttggttttttgatcaggcgcgtccaagcttcgcaggaaagaacatgtgagcaaaaggccagcaaaaggcgttaactctagatttaaatgcatgctggggagagatctaggaacccctagtgatggagttggccactccctctctgcgcgctcgctcgctcactgaggccgcccgggcaaagcccgggcgtcgggcgacctttggtcgcccggcctcagtgagcgagcgagcgcgcagagagggagtggccaa

SEQ ID NO: 432 - DNA, 4899 bp, Artificial Sequence
  Exemplary recombinant AAV genome containing NRL promoter (5'->3' upper strand)
  misc_feature (429)..(454): a, c, g, or t
  misc_feature (821)..(846): a, c, g, or t
ttggccactccctctctgcgcgctcgctcgctcactgaggccgggcgaccaaaggtcgcccgacgcccgggctttgcccgggcggcctcagtgagcgagcgagcgcgcagagagggagtggccaactccatcactaggggttcctcagatctgaattcggtaccaaggtcgggcaggaagagggcctatttcccatgattccttcatatttgcatatacgatacaaggctgttagagagataattagaattaatttgactgtaaacacaaagatattagtacaaaatacgtgacgtagaaagtaataatttcttgggtagtttgcagttttaaaattatgttttaaaatggactatcatatgcttaccgtaacttgaaagtatttcgatttcttggctttatatatcttgtggaaaggacgaaacaccnnnnnnnnnnnnnnnnnnnnnnnnnngttttagtactctggaaacagaatctactaaaacaaggcaaaatgccgtgtttatctcgtcaacttgttggcgagattttttcgacttagttcgatcgaaggaaggtcgggcaggaagagggcctatttcccatgattccttcatatttgcatatacgatacaaggctgttagagagataattagaattaatttgactgtaaacacaaagatattagtacaaaatacgtgacgtagaaagtaataatttcttgggtagtttgcagttttaaaattatgttttaaaatggactatcatatgcttaccgtaacttgaaagtatttcgatttcttggctttatatatcttgtggaaaggacgaaacaccnnnnnnnnnnnnnnnnnnnnnnnnnngttttagtactctggaaacagaatctactaaaacaaggcaaaatgccgtgtttatctcgtcaacttgttggcgagattttttggtaccgctagcgcttaagtcgcgatgtacgggccagatatacgcgttgacattgattattgactagtaggtaggaagtggcctttaactccatagaccctatttaaacagcttcggacaggtttaaacatctccttggataattcctagtatccctgttcccactcctactcagggatgatagctctaagaggtgttaggggattaggctgaaaatgtaggtcacccctcagccatctgggaactagaatgagtgagagaggagagaggggcagagacacacacattcgcatattaaggtgacgcgtgtggcctcgaacaccgagcgaccctgcagcgacccgcttaagcggccgctaatacgactcactatagggagagccgccaccatgccgaagaaaaagcgcaaggtcgaagcgtccatgaaaaggaactacattctggggctggacatcgggattacaagcgtggggtatgggattattgactatgaaacaagggacgtgatcgacgcaggcgtcagactgttcaaggaggccaacgtggaaaacaatgagggacggagaagcaagaggggagccaggcgcctgaaacgacggagaaggcacagaatccagagggtgaagaaactgctgttcgattacaacctgctgaccgaccattctgagctgagtggaattaatccttatgaagccagggtgaaaggcctgagtcagaagctgtcagaggaagagttttccgcagctctgctgcacctggctaagcgccgaggagtgcataacgtcaatgaggtggaagaggacaccggcaacgagctgtctacaaaggaacagatctcacgcaatagcaaagctctggaagagaagtatgtcgcagagctgcagctggaacggctgaagaaagatggcgaggtgagagggtcaattaataggttcaagacaagcgactacgtcaaagaagccaagcagctgctgaaagtgcagaaggcttaccaccagctggatcagagcttcatcgatacttatatcgacctgctggagactcggagaacctactatgagggaccaggagaagggagccccttcggatggaaagacatcaaggaatggtacgagatgctgatgggacattgcacctattttccagaagagctgagaagcgtcaagtacgcttataacgcagatctgtacaacgccctgaatgacctgaacaacctggtcatcaccagggatgaaaacgagaaactggaatactatgagaagttccagatcatcgaaaacgtgtttaagcagaagaaaaagcctacactgaaacagattgctaaggagatcctggtcaacgaagaggacatcaagggctaccgggtgacaagcactggaaaaccagagttcaccaatctgaaagtgtatcacgatattaaggacatcacagcacggaaagaaatcattgagaacgccgaactgctggatcagattgctaagatcctgactatctaccagagctccgaggacatccaggaagagctgactaacctgaacagcgagctgacccaggaagagatcgaacagattagtaatctgaaggggtacaccggaacacacaacctgtccctgaaagctatcaatctgattctggatgagctgtggcatacaaacgacaatcagattgcaatctttaaccggctgaagctggtcccaaaaaaggtggacctgagtcagcagaaagagatcccaaccacactggtggacgatttcattctgtcacccgtggtcaagcggagcttcatccagagcatcaaagtgatcaacgccatcatcaagaagtacggcctgcccaatgatatcattatcgagctggctagggagaagaacagcaaggacgcacagaagatgatcaatgagatgcagaaacgaaaccggcagaccaatgaacgcattgaagagattatccgaactaccgggaaagagaacgcaaagtacctgattgaaaaaatcaagctgcacgatatgcaggagggaaagtgtctgtattctctggaggccatccccctggaggacctgctgaacaatccattcaactacgaggtcgatcatattatccccagaagcgtgtccttcgacaattcctttaacaacaaggtgctggtcaagcaggaagagaactctaaaaagggcaataggactcctttccagtacctgtctagttcagattccaagatctcttacgaaacctttaaaaagcacattctgaatctggccaaaggaaagggccgcatcagcaagaccaaaaaggagtacctgctggaagagcgggacatcaacagattctccgtccagaaggattttattaaccggaatctggtggacacaagatacgctactcgcggcctgatgaatctgctgcgatcctatttccgggtgaacaatctggatgtgaaagtcaagtccatcaacggcgggttcacatcttttctgaggcgcaaatggaagtttaaaaaggagcgcaacaaagggtacaagcaccatgccgaagatgctctgattatcgcaaatgccgacttcatctttaaggagtggaaaaagctggacaaagccaagaaagtgatggagaaccagatgttcgaagagaagcaggccgaatctatgcccgaaatcgagacagaacaggagtacaaggagattttcatcactcctcaccagatcaagcatatcaaggatttcaaggactacaagtactctcaccgggtggataaaaagcccaacagagagctgatcaatgacaccctgtatagtacaagaaaagacgataaggggaataccctgattgtgaacaatctgaacggactgtacgacaaagataatgacaagctgaaaaagctgatcaacaaaagtcccgagaagctgctgatgtaccaccatgatcctcagacatatcagaaactgaagctgattatggagcagtacggcgacgagaagaacccactgtataagtactatgaagagactgggaactacctgaccaagtatagcaaaaaggataatggccccgtgatcaagaagatcaagtactatgggaacaagctgaatgcccatctggacatcacagacgattaccctaacagtcgcaacaaggtggtcaagctgtcactgaagccatacagattcgatgtctatctggacaacggcgtgtataaatttgtgactgtcaagaatctggatgtcatcaaaaaggagaactactatgaagtgaatagcaagtgctacgaagaggctaaaaagctgaaaaagattagcaaccaggcagagttcatcgcctccttttacaacaacgacctgattaagatcaatggcgaactgtatagggtcatcggggtgaacaatgatctgctgaaccgcattgaagtgaatatgattgacatcacttaccgagagtatctggaaaacatgaatgataagcgcccccctcgaattatcaaaacaattgcctctaagactcagagtatcaaaaagtactcaaccgacattctgggaaacctgtatgaggtgaagagcaaaaagcaccctcagattatcaaaaagggcggatcccccaagaagaagaggaaagtctcgagcgactacaaagaccatgacggtgattataaagatcatgacatcgattacaaggatgacgatgacaagtagcaataaaggatcgtttattttcattggaagcgtgtgttggttttttgatcaggcgcgtccaagcttcgcaggaaagaacatgtgagcaaaaggccagcaaaaggcgttaactctagatttaaatgcatgctggggagagatctaggaacccctagtgatggagttggccactccctctctgcgcgctcgctcgctcactgaggccgcccgggcaaagcccgggcgtcgggcgacctttggtcgcccggcctcagtgagcgagcgagcgcgcagagagggagtggccaa

SEQ ID NO: 433 - DNA, 4853 bp, Artificial Sequence
  Exemplary recombinant AAV genome containing NRL promoter (5'->3' upper strand)
  misc_feature (429)..(454): a, c, g, or t
  misc_feature (821)..(846): a, c, g, or t
ttggccactccctctctgcgcgctcgctcgctcactgaggccgggcgaccaaaggtcgcccgacgcccgggctttgcccgggcggcctcagtgagcgagcgagcgcgcagagagggagtggccaactccatcactaggggttcctcagatctgaattcggtaccaaggtcgggcaggaagagggcctatttcccatgattccttcatatttgcatatacgatacaaggctgttagagagataattagaattaatttgactgtaaacacaaagatattagtacaaaatacgtgacgtagaaagtaataatttcttgggtagtttgcagttttaaaattatgttttaaaatggactatcatatgcttaccgtaacttgaaagtatttcgatttcttggctttatatatcttgtggaaaggacgaaacaccnnnnnnnnnnnnnnnnnnnnnnnnnngttttagtactctggaaacagaatctactaaaacaaggcaaaatgccgtgtttatctcgtcaacttgttggcgagattttttcgacttagttcgatcgaaggaaggtcgggcaggaagagggcctatttcccatgattccttcatatttgcatatacgatacaaggctgttagagagataattagaattaatttgactgtaaacacaaagatattagtacaaaatacgtgacgtagaaagtaataatttcttgggtagtttgcagttttaaaattatgttttaaaatggactatcatatgcttaccgtaacttgaaagtatttcgatttcttggctttatatatcttgtggaaaggacgaaacaccnnnnnnnnnnnnnnnnnnnnnnnnnngttttagtactctggaaacagaatctactaaaacaaggcaaaatgccgtgtttatctcgtcaacttgttggcgagattttttggtaccgctagcgcttaagtcgcgatgtacgggccagatatacgcgttgacattgattattgactagtattttaatctcactagggttctgggagcacccccccccaccgctcccgccctccacaaagctcctgggcccctcctcccttcaaggattgcgaagaactggtcgcaaatcctcctaagccaccagcatctcggtcttcagctcacaccagccttgagcccagcctgcggccaggggaccacgcacgtcccacccacccagcgactccccagccgctgcccactcttcctcactcagcggccgctaatacgactcactatagggagagccgccaccatgccgaagaaaaagcgcaaggtcgaagcgtccatgaaaaggaactacattctggggctggacatcgggattacaagcgtggggtatgggattattgactatgaaacaagggacgtgatcgacgcaggcgtcagactgttcaaggaggccaacgtggaaaacaatgagggacggagaagcaagaggggagccaggcgcctgaaacgacggagaaggcacagaatccagagggtgaagaaactgctgttcgattacaacctgctgaccgaccattctgagctgagtggaattaatccttatgaagccagggtgaaaggcctgagtcagaagctgtcagaggaagagttttccgcagctctgctgcacctggctaagcgccgaggagtgcataacgtcaatgaggtggaagaggacaccggcaacgagctgtctacaaaggaacagatctcacgcaatagcaaagctctggaagagaagtatgtcgcagagctgcagctggaacggctgaagaaagatggcgaggtgagagggtcaattaataggttcaagacaagcgactacgtcaaagaagccaagcagctgctgaaagtgcagaaggcttaccaccagctggatcagagcttcatcgatacttatatcgacctgctggagactcggagaacctactatgagggaccaggagaagggagccccttcggatggaaagacatcaaggaatggtacgagatgctgatgggacattgcacctattttccagaagagctgagaagcgtcaagtacgcttataacgcagatctgtacaacgccctgaatgacctgaacaacctggtcatcaccagggatgaaaacgagaaactggaatactatgagaagttccagatcatcgaaaacgtgtttaagcagaagaaaaagcctacactgaaacagattgctaaggagatcctggtcaacgaagaggacatcaagggctaccgggtgacaagcactggaaaaccagagttcaccaatctgaaagtgtatcacgatattaaggacatcacagcacggaaagaaatcattgagaacgccgaactgctggatcagattgctaagatcctgactatctaccagagctccgaggacatccaggaagagctgactaacctgaacagcgagctgacccaggaagagatcgaacagattagtaatctgaaggggtacaccggaacacacaacctgtccctgaaagctatcaatctgattctggatgagctgtggcatacaaacgacaatcagattgcaatctttaaccggctgaagctggtcccaaaaaaggtggacctgagtcagcagaaagagatcccaaccacactggtggacgatttcattctgtcacccgtggtcaagcggagcttcatccagagcatcaaagtgatcaacgccatcatcaagaagtacggcctgcccaatgatatcattatcgagctggctagggagaagaacagcaaggacgcacagaagatgatcaatgagatgcagaaacgaaaccggcagaccaatgaacgcattgaagagattatccgaactaccgggaaagagaacgcaaagtacctgattgaaaaaatcaagctgcacgatatgcaggagggaaagtgtctgtattctctggaggccatccccctggaggacctgctgaacaatccattcaactacgaggtcgatcatattatccccagaagcgtgtccttcgacaattcctttaacaacaaggtgctggtcaagcaggaagagaactctaaaaagggcaataggactcctttccagtacctgtctagttcagattccaagatctcttacgaaacctttaaaaagcacattctgaatctggccaaaggaaagggccgcatcagcaagaccaaaaaggagtacctgctggaagagcgggacatcaacagattctccgtccagaaggattttattaaccggaatctggtggacacaagatacgctactcgcggcctgatgaatctgctgcgatcctatttccgggtgaacaatctggatgtgaaagtcaagtccatcaacggcgggttcacatcttttctgaggcgcaaatggaagtttaaaaaggagcgcaacaaagggtacaagcaccatgccgaagatgctctgattatcgcaaatgccgacttcatctttaaggagtggaaaaagctggacaaagccaagaaagtgatggagaaccagatgttcgaagagaagcaggccgaatctatgcccgaaatcgagacagaacaggagtacaaggagattttcatcactcctcaccagatcaagcatatcaaggatttcaaggactacaagtactctcaccgggtggataaaaagcccaacagagagctgatcaatgacaccctgtatagtacaagaaaagacgataaggggaataccctgattgtgaacaatctgaacggactgtacgacaaagataatgacaagctgaaaaagctgatcaacaaaagtcccgagaagctgctgatgtaccaccatgatcctcagacatatcagaaactgaagctgattatggagcagtacggcgacgagaagaacccactgtataagtactatgaagagactgggaactacctgaccaagtatagcaaaaaggataatggccccgtgatcaagaagatcaagtactatgggaacaagctgaatgcccatctggacatcacagacgattaccctaacagtcgcaacaaggtggtcaagctgtcactgaagccatacagattcgatgtctatctggacaacggcgtgtataaatttgtgactgtcaagaatctggatgtcatcaaaaaggagaactactatgaagtgaatagcaagtgctacgaagaggctaaaaagctgaaaaagattagcaaccaggcagagttcatcgcctccttttacaacaacgacctgattaagatcaatggcgaactgtatagggtcatcggggtgaacaatgatctgctgaaccgcattgaagtgaatatgattgacatcacttaccgagagtatctggaaaacatgaatgataagcgcccccctcgaattatcaaaacaattgcctctaagactcagagtatcaaaaagtactcaaccgacattctgggaaacctgtatgaggtgaagagcaaaaagcaccctcagattatcaaaaagggcggatcccccaagaagaagaggaaagtctcgagcgactacaaagaccatgacggtgattataaagatcatgacatcgattacaaggatgacgatgacaagtagcaataaaggatcgtttattttcattggaagcgtgtgttggttttttgatcaggcgcgtccaagcttcgcaggaaagaacatgtgagcaaaaggccagcaaaaggcgttaactctagatttaaatgcatgctggggagagatctaggaacccctagtgatggagttggccactccctctctgcgcgctcgctcgctcactgaggccgcccgggcaaagcccgggcgtcgggcgacctttggtcgcccggcctcagtgagcgagcgagcgcgcagagagggagtggccaa

SEQ ID NO: 434 - protein, 7 aa, Artificial Sequence
  Exemplary N-ter NLS
PKKKRKV

SEQ ID NO: 435 - skipped

SEQ ID NO: 436 - DNA, 143 bp, Artificial Sequence
  AAV1 right ITR sequence
ttacccctagtgatggagttgcccactccctctctgcgcgctcgctcgctcggtggggccggcagagcagagctctgccgtctgcggacctttggtccgcaggccccaccgagcgagcgagcgcgcagagagggagtgggcaa

SEQ ID NO: 437 - DNA, 145 bp, Artificial Sequence
  AAV2 right ITR sequence
aggaacccctagtgatggagttggccactccctctctgcgcgctcgctcgctcactgaggccgcccgggcaaagcccgggcgtcgggcgacctttggtcgcccggcctcagtgagcgagcgagcgcgcagagagggagtggccaa

SEQ ID NO: 438 - DNA, 142 bp, Artificial Sequence
  AAV3B right ITR sequence
atacctctagtgatggagttggccactccctctatgcgcactcgctcgctcggtggggccggacgtgcaaagcacgtccgtctggcgacctttggtcgccaggccccaccgagcgagcgagtgcgcatagagggagtggcca

SEQ ID NO: 439 - DNA, 146 bp, Artificial Sequence
  AAV4 right ITR sequence
gggcaaacctagatgatggagttggccactccctctatgcgcgctcgctcactcactcggccctgccggccagaggccggcagtctggagacctttggtctccagggccgagtgagtgagcgagcgcgcatagagggagtggccaa

SEQ ID NO: 440 - DNA, 155 bp, Artificial Sequence
  AAV5 right ITR sequence
ttgcttgagagtgtggcactctcccccctgtcgcgttcgctcgctcgctggctcgtttgggggggcgacggccagagggccgtcgtctggcagctctttgagctgccacccccccaaacgagccagcgagcgagcgaacgcgacaggggggagag

SEQ ID NO: 441 - DNA, 143 bp, Artificial Sequence
  AAV6 right ITR sequence
ttgcccactccctctatgcgcgctcgctcgctcggtggggcctgcggaccaaaggtccgcagacggcagagctctgctctgccggccccaccgagcgagcgagcgcgcatagagggagtgggcaactccatcactaggggtat

SEQ ID NO: 442 - DNA, 145 bp, Artificial Sequence
  AAV7 right ITR sequence
cggtacccctagtgatggagttggccactccctctatgcgcgctcgctcgctcggtggggccggcagagcagagctctgccgtctgcggacctttggtccgcaggccccaccgagcgagcgagcgcgcatagagggagtggccaa

SEQ ID NO: 443 - DNA, 145 bp, Artificial Sequence
  AAV8 right ITR sequence
ggtgtcgcaaaatgccgcaaaagcactcacgtgacagctaatacaggaccactcccctatgacgtaatttacgtcagcgctgacgcggcagcgtgggaggcgcttcgcgctacccctagtgatggagttggccactccctctctg

SEQ ID NO: 444 - DNA, 145 bp, Artificial Sequence
  AAV9 right ITR sequence
gtgtcgcaaaatgtcgcaaaagcactcacgtgacagctaatacaggaccactcccctatgacgtaatctacgtcagcgctgacgcggcagcgtgggaggcgcttcgcgattacccctagtgatggagttggccactccctctctg

SEQ ID NO: 445 - DNA, 5217 bp, Artificial Sequence
  Exemplary recombinant AAV genome containing CMV promoter (3'->5' lower strand)
  misc_feature (4372)..(4397): a, c, g, or t
  misc_feature (4764)..(4789): a, c, g, or t
ttggccactccctctctgcgcgctcgctcgctcactgaggccgggcgaccaaaggtcgcccgacgcccgggctttgcccgggcggcctcagtgagcgagcgagcgcgcagagagggagtggccaactccatcactaggggttcctagatctctccccagcatgcatttaaatctagagttaacgccttttgctggccttttgctcacatgttctttcctgcgaagcttggacgcgcctgatcaaaaaaccaacacacgcttccaatgaaaataaacgatcctttattgctacttgtcatcgtcatccttgtaatcgatgtcatgatctttataatcaccgtcatggtctttgtagtcgctcgagactttcctcttcttcttgggggatccgccctttttgataatctgagggtgctttttgctcttcacctcatacaggtttcccagaatgtcggttgagtactttttgatactctgagtcttagaggcaattgttttgataattcgaggggggcgcttatcattcatgttttccagatactctcggtaagtgatgtcaatcatattcacttcaatgcggttcagcagatcattgttcaccccgatgaccctatacagttcgccattgatcttaatcaggtcgttgttgtaaaaggaggcgatgaactctgcctggttgctaatctttttcagctttttagcctcttcgtagcacttgctattcacttcatagtagttctcctttttgatgacatccagattcttgacagtcacaaatttatacacgccgttgtccagatagacatcgaatctgtatggcttcagtgacagcttgaccaccttgttgcgactgttagggtaatcgtctgtgatgtccagatgggcattcagcttgttcccatagtacttgatcttcttgatcacggggccattatcctttttgctatacttggtcaggtagttcccagtctcttcatagtacttatacagtgggttcttctcgtcgccgtactgctccataatcagcttcagtttctgatatgtctgaggatcatggtggtacatcagcagcttctcgggacttttgttgatcagctttttcagcttgtcattatctttgtcgtacagtccgttcagattgttcacaatcagggtattccccttatcgtcttttcttgtactatacagggtgtcattgatcagctctctgttgggctttttatccacccggtgagagtacttgtagtccttgaaatccttgatatgcttgatctggtgaggagtgatgaaaatctccttgtactcctgttctgtctcgatttcgggcatagattcggcctgcttctcttcgaacatctggttctccatcactttcttggctttgtccagctttttccactccttaaagatgaagtcggcatttgcgataatcagagcatcttcggcatggtgcttgtaccctttgttgcgctcctttttaaacttccatttgcgcctcagaaaagatgtgaacccgccgttgatggacttgactttcacatccagattgttcacccggaaataggatcgcagcagattcatcaggccgcgagtagcgtatcttgtgtccaccagattccggttaataaaatccttctggacggagaatctgttgatgtcccgctcttccagcaggtactcctttttggtcttgctgatgcggccctttcctttggccagattcagaatgtgctttttaaaggtttcgtaagagatcttggaatctgaactagacaggtactggaaaggagtcctattgccctttttagagttctcttcctgcttgaccagcaccttgttgttaaaggaattgtcgaaggacacgcttctggggataatatgatcgacctcgtagttgaatggattgttcagcaggtcctccagggggatggcctccagagaatacagacactttccctcctgcatatcgtgcagcttgattttttcaatcaggtactttgcgttctctttcccggtagttcggataatctcttcaatgcgttcattggtctgccggtttcgtttctgcatctcattgatcatcttctgtgcgtccttgctgttcttctccctagccagctcgataatgatatcattgggcaggccgtacttcttgatgatggcgttgatcactttgatgctctggatgaagctccgcttgaccacgggtgacagaatgaaatcgtccaccagtgtggttgggatctctttctgctgactcaggtccaccttttttgggaccagcttcagccggttaaagattgcaatctgattgtcgtttgtatgccacagctcatccagaatcagattgatagctttcagggacaggttgtgtgttccggtgtaccccttcagattactaatctgttcgatctcttcctgggtcagctcgctgttcaggttagtcagctcttcctggatgtcctcggagctctggtagatagtcaggatcttagcaatctgatccagcagttcggcgttctcaatgatttctttccgtgctgtgatgtccttaatatcgtgatacactttcagattggtgaactctggttttccagtgcttgtcacccggtagcccttgatgtcctcttcgttgaccaggatctccttagcaatctgtttcagtgtaggctttttcttctgcttaaacacgttttcgatgatctggaacttctcatagtattccagtttctcgttttcatccctggtgatgaccaggttgttcaggtcattcagggcgttgtacagatctgcgttataagcgtacttgacgcttctcagctcttctggaaaataggtgcaatgtcccatcagcatctcgtaccattccttgatgtctttccatccgaaggggctcccttctcctggtccctcatagtaggttctccgagtctccagcaggtcgatataagtatcgatgaagctctgatccagctggtggtaagccttctgcactttcagcagctgcttggcttctttgacgtagtcgcttgtcttgaacctattaattgaccctctcacctcgccatctttcttcagccgttccagctgcagctctgcgacatacttctcttccagagctttgctattgcgtgagatctgttcctttgtagacagctcgttgccggtgtcctcttccacctcattgacgttatgcactcctcggcgcttagccaggtgcagcagagctgcggaaaactcttcctctgacagcttctgactcaggcctttcaccctggcttcataaggattaattccactcagctcagaatggtcggtcagcaggttgtaatcgaacagcagtttcttcaccctctggattctgtgccttctccgtcgtttcaggcgcctggctcccctcttgcttctccgtccctcattgttttccacgttggcctccttgaacagtctgacgcctgcgtcgatcacgtcccttgtttcatagtcaataatcccataccccacgcttgtaatcccgatgtccagccccagaatgtagttccttttcatggacgcttcgaccttgcgctttttcttcggcatggtggcggctctccctatagtgagtcgtattagcggccgcgcggatctctagcggatctgacggttcactaaaccagctctgcttatatagacctcccaccgtacacgcctaccgcccatttgcgtcaatggggcggagttgttacgacattttggaaagtcccgttgattttggtgccaaaacaaactcccattgacgtcaatggggtggagacttggaaatccccgtgagtcaaaccgctatccacgcccattgatgtactgccaaaaccgcatcaccatggtaatagcgatgactaatacgtagatgtactgccaagtaggaaagtcccataaggtcatgtactgggcataatgccaggcgggccatttaccgtcattgacgtcaatagggggcgtacttggcatatgatacacttgatgtactgccaagtgggcagtttaccgtaaatagtccacccattgacgtcaatggaaagtccctattggcgttactatgggaacatacgtcattattgacgtcaatgggcgggggtcgttgggcggtcagccaggcgggccatttaccgtaagttatgtaacgcggaactccatatatgggctatgaactaatgaccccgtaattgattactattaataactagtcaataatcaatgtcaacgcgtatatctggcccgtacatcgcgacttaagcgctagcggtaccaaaaaatctcgccaacaagttgacgagataaacacggcattttgccttgttttagtagattctgtttccagagtactaaaacnnnnnnnnnnnnnnnnnnnnnnnnnnggtgtttcgtcctttccacaagatatataaagccaagaaatcgaaatactttcaagttacggtaagcatatgatagtccattttaaaacataattttaaaactgcaaactacccaagaaattattactttctacgtcacgtattttgtactaatatctttgtgtttacagtcaaattaattctaattatctctctaacagccttgtatcgtatatgcaaatatgaaggaatcatgggaaataggccctcttcctgcccgaccttccttcgatcgaactaagtcgaaaaaatctcgccaacaagttgacgagataaacacggcattttgccttgttttagtagattctgtttccagagtactaaaacnnnnnnnnnnnnnnnnnnnnnnnnnnggtgtttcgtcctttccacaagatatataaagccaagaaatcgaaatactttcaagttacggtaagcatatgatagtccattttaaaacataattttaaaactgcaaactacccaagaaattattactttctacgtcacgtattttgtactaatatctttgtgtttacagtcaaattaattctaattatctctctaacagccttgtatcgtatatgcaaatatgaaggaatcatgggaaataggccctcttcctgcccgaccttggtaccgaattcagatctgaggaacccctagtgatggagttggccactccctctctgcgcgctcgctcgctcactgaggccgcccgggcaaagcccgggcgtcgggcgacctttggtcgcccggcctcagtgagcgagcgagcgcgcagagagggagtggccaa

SEQ ID NO: 446 - DNA, 4870 bp, Artificial Sequence
  Exemplary recombinant AAV genome containing EFS promoter (3'->5' lower strand)
  misc_feature (4025)..(4050): a, c, g, or t
  misc_feature (4417)..(4442): a, c, g, or t
ttggccactccctctctgcgcgctcgctcgctcactgaggccgggcgaccaaaggtcgcccgacgcccgggctttgcccgggcggcctcagtgagcgagcgagcgcgcagagagggagtggccaactccatcactaggggttcctagatctctccccagcatgcatttaaatctagagttaacgccttttgctggccttttgctcacatgttctttcctgcgaagcttggacgcgcctgatcaaaaaaccaacacacgcttccaatgaaaataaacgatcctttattgctacttgtcatcgtcatccttgtaatcgatgtcatgatctttataatcaccgtcatggtctttgtagtcgctcgagactttcctcttcttcttgggggatccgccctttttgataatctgagggtgctttttgctcttcacctcatacaggtttcccagaatgtcggttgagtactttttgatactctgagtcttagaggcaattgttttgataattcgaggggggcgcttatcattcatgttttccagatactctcggtaagtgatgtcaatcatattcacttcaatgcggttcagcagatcattgttcaccccgatgaccctatacagttcgccattgatcttaatcaggtcgttgttgtaaaaggaggcgatgaactctgcctggttgctaatctttttcagctttttagcctcttcgtagcacttgctattcacttcatagtagttctcctttttgatgacatccagattcttgacagtcacaaatttatacacgccgttgtccagatagacatcgaatctgtatggcttcagtgacagcttgaccaccttgttgcgactgttagggtaatcgtctgtgatgtccagatgggcattcagcttgttcccatagtacttgatcttcttgatcacggggccattatcctttttgctatacttggtcaggtagttcccagtctcttcatagtacttatacagtgggttcttctcgtcgccgtactgctccataatcagcttcagtttctgatatgtctgaggatcatggtggtacatcagcagcttctcgggacttttgttgatcagctttttcagcttgtcattatctttgtcgtacagtccgttcagattgttcacaatcagggtattccccttatcgtcttttcttgtactatacagggtgtcattgatcagctctctgttgggctttttatccacccggtgagagtacttgtagtccttgaaatccttgatatgcttgatctggtgaggagtgatgaaaatctccttgtactcctgttctgtctcgatttcgggcatagattcggcctgcttctcttcgaacatctggttctccatcactttcttggctttgtccagctttttccactccttaaagatgaagtcggcatttgcgataatcagagcatcttcggcatggtgcttgtaccctttgttgcgctcctttttaaacttccatttgcgcctcagaaaagatgtgaacccgccgttgatggacttgactttcacatccagattgttcacccggaaataggatcgcagcagattcatcaggccgcgagtagcgtatcttgtgtccaccagattccggttaataaaatccttctggacggagaatctgttgatgtcccgctcttccagcaggtactcctttttggtcttgctgatgcggccctttcctttggccagattcagaatgtgctttttaaaggtttcgtaagagatcttggaatctgaactagacaggtactggaaaggagtcctattgccctttttagagttctcttcctgcttgaccagcaccttgttgttaaaggaattgtcgaaggacacgcttctggggataatatgatcgacctcgtagttgaatggattgttcagcaggtcctccagggggatggcctccagagaatacagacactttccctcctgcatatcgtgcagcttgattttttcaatcaggtactttgcgttctctttcccggtagttcggataatctcttcaatgcgttcattggtctgccggtttcgtttctgcatctcattgatcatcttctgtgcgtccttgctgttcttctccctagccagctcgataatgatatcattgggcaggccgtacttcttgatgatggcgttgatcactttgatgctctggatgaagctccgcttgaccacgggtgacagaatgaaatcgtccaccagtgtggttgggatctctttctgctgactcaggtccaccttttttgggaccagcttcagccggttaaagattgcaatctgattgtcgtttgtatgccacagctcatccagaatcagattgatagctttcagggacaggttgtgtgttccggtgtaccccttcagattactaatctgttcgatctcttcctgggtcagctcgctgttcaggttagtcagctcttcctggatgtcctcggagctctggtagatagtcaggatcttagcaatctgatccagcagttcggcgttctcaatgatttctttccgtgctgtgatgtccttaatatcgtgatacactttcagattggtgaactctggttttccagtgcttgtcacccggtagcccttgatgtcctcttcgttgaccaggatctccttagcaatctgtttcagtgtaggctttttcttctgcttaaacacgttttcgatgatctggaacttctcatagtattccagtttctcgttttcatccctggtgatgaccaggttgttcaggtcattcagggcgttgtacagatctgcgttataagcgtacttgacgcttctcagctcttctggaaaataggtgcaatgtcccatcagcatctcgtaccattccttgatgtctttccatccgaaggggctcccttctcctggtccctcatagtaggttctccgagtctccagcaggtcgatataagtatcgatgaagctctgatccagctggtggtaagccttctgcactttcagcagctgcttggcttctttgacgtagtcgcttgtcttgaacctattaattgaccctctcacctcgccatctttcttcagccgttccagctgcagctctgcgacatacttctcttccagagctttgctattgcgtgagatctgttcctttgtagacagctcgttgccggtgtcctcttccacctcattgacgttatgcactcctcggcgcttagccaggtgcagcagagctgcggaaaactcttcctctgacagcttctgactcaggcctttcaccctggcttcataaggattaattccactcagctcagaatggtcggtcagcaggttgtaatcgaacagcagtttcttcaccctctggattctgtgccttctccgtcgtttcaggcgcctggctcccctcttgcttctccgtccctcattgttttccacgttggcctccttgaacagtctgacgcctgcgtcgatcacgtcccttgtttcatagtcaataatcccataccccacgcttgtaatcccgatgtccagccccagaatgtagttccttttcatggacgcttcgaccttgcgctttttcttcggcatggtggcggctctccctatagtgagtcgtattagcggccgcccgcggtcacgacacctgtgttctggcggcaaacccgttgcgaaaaagaacgttcacggcgactactgcacttatatacggttctcccccaccctcgggaaaaaggcggagccagtacacgacatcactttcccagtttaccccgcgccaccttctctaggcaccggttcaattgccgacccctccccccaacttctcggggactgtgggcgatgtgcgctctgcccactgacgggcaccggagccactcgaactagtcaataatcaatgtcaacgcgtatatctggcccgtacatcgcgacttaagcgctagcggtaccaaaaaatctcgccaacaagttgacgagataaacacggcattttgccttgttttagtagattctgtttccagagtactaaaacnnnnnnnnnnnnnnnnnnnnnnnnnnggtgtttcgtcctttccacaagatatataaagccaagaaatcgaaatactttcaagttacggtaagcatatgatagtccattttaaaacataattttaaaactgcaaactacccaagaaattattactttctacgtcacgtattttgtactaatatctttgtgtttacagtcaaattaattctaattatctctctaacagccttgtatcgtatatgcaaatatgaaggaatcatgggaaataggccctcttcctgcccgaccttccttcgatcgaactaagtcgaaaaaatctcgccaacaagttgacgagataaacacggcattttgccttgttttagtagattctgtttccagagtactaaaacnnnnnnnnnnnnnnnnnnnnnnnnnnggtgtttcgtcctttccacaagatatataaagccaagaaatcgaaatactttcaagttacggtaagcatatgatagtccattttaaaacataattttaaaactgcaaactacccaagaaattattactttctacgtcacgtattttgtactaatatctttgtgtttacagtcaaattaattctaattatctctctaacagccttgtatcgtatatgcaaatatgaaggaatcatgggaaataggccctcttcctgcccgaccttggtaccgaattcagatctgaggaacccctagtgatggagttggccactccctctctgcgcgctcgctcgctcactgaggccgcccgggcaaagcccgggcgtcgggcgacctttggtcgcccggcctcagtgagcgagcgagcgcgcagagagggagtggccaa

SEQ ID NO: 447 - DNA, 4862 bp, Artificial Sequence
  Exemplary recombinant AAV genome containing CRK1 promoter (3'->5' lower strand)
  misc_feature (4409)..(4434): a, c, g, or t
ttggccactccctctctgcgcgctcgctcgctcactgaggccgggcgaccaaaggtcgcccgacgcccgggctttgcccgggcggcctcagtgagcgagcgagcgcgcagagagggagtggccaactccatcactaggggttcctagatctctccccagcatgcatttaaatctagagttaacgccttttgctggccttttgctcacatgttctttcctgcgaagcttggacgcgcctgatcaaaaaaccaacacacgcttccaatgaaaataaacgatcctttattgctacttgtcatcgtcatccttgtaatcgatgtcatgatctttataatcaccgtcatggtctttgtagtcgctcgagactttcctcttcttcttgggggatccgccctttttgataatctgagggtgctttttgctcttcacctcatacaggtttcccagaatgtcggttgagtactttttgatactctgagtcttagaggcaattgttttgataattcgaggggggcgcttatcattcatgttttccagatactctcggtaagtgatgtcaatcatattcacttcaatgcggttcagcagatcattgttcaccccgatgaccctatacagttcgccattgatcttaatcaggtcgttgttgtaaaaggaggcgatgaactctgcctggttgctaatctttttcagctttttagcctcttcgtagcacttgctattcacttcatagtagttctcctttttgatgacatccagattcttgacagtcacaaatttatacacgccgttgtccagatagacatcgaatctgtatggcttcagtgacagcttgaccaccttgttgcgactgttagggtaatcgtctgtgatgtccagatgggcattcagcttgttcccatagtacttgatcttcttgatcacggggccattatcctttttgctatacttggtcaggtagttcccagtctcttcatagtacttatacagtgggttcttctcgtcgccgtactgctccataatcagcttcagtttctgatatgtctgaggatcatggtggtacatcagcagcttctcgggacttttgttgatcagctttttcagcttgtcattatctttgtcgtacagtccgttcagattgttcacaatcagggtattccccttatcgtcttttcttgtactatacagggtgtcattgatcagctctctgttgggctttttatccacccggtgagagtacttgtagtccttgaaatccttgatatgcttgatctggtgaggagtgatgaaaatctccttgtactcctgttctgtctcgatttcgggcatagattcggcctgcttctcttcgaacatctggttctccatcactttcttggctttgtccagctttttccactccttaaagatgaagtcggcatttgcgataatcagagcatcttcggcatggtgcttgtaccctttgttgcgctcctttttaaacttccatttgcgcctcagaaaagatgtgaacccgccgttgatggacttgactttcacatccagattgttcacccggaaataggatcgcagcagattcatcaggccgcgagtagcgtatcttgtgtccaccagattccggttaataaaatccttctggacggagaatctgttgatgtcccgctcttccagcaggtactcctttttggtcttgctgatgcggccctttcctttggccagattcagaatgtgctttttaaaggtttcgtaagagatcttggaatctgaactagacaggtactggaaaggagtcctattgccctttttagagttctcttcctgcttgaccagcaccttgttgttaaaggaattgtcgaaggacacgcttctggggataatatgatcgacctcgtagttgaatggattgttcagcaggtcctccagggggatggcctccagagaatacagacactttccctcctgcatatcgtgcagcttgattttttcaatcaggtactttgcgttctctttcccggtagttcggataatctcttcaatgcgttcattggtctgccggtttcgtttctgcatctcattgatcatcttctgtgcgtccttgctgttcttctccctagccagctcgataatgatatcattgggcaggccgtacttcttgatgatggcgttgatcactttgatgctctggatgaagctccgcttgaccacgggtgacagaatgaaatcgtccaccagtgtggttgggatctctttctgctgactcaggtccaccttttttgggaccagcttcagccggttaaagattgcaatctgattgtcgtttgtatgccacagctcatccagaatcagattgatagctttcagggacaggttgtgtgttccggtgtaccccttcagattactaatctgttcgatctcttcctgggtcagctcgctgttcaggttagtcagctcttcctggatgtcctcggagctctggtagatagtcaggatcttagcaatctgatccagcagttcggcgttctcaatgatttctttccgtgctgtgatgtccttaatatcgtgatacactttcagattggtgaactctggttttccagtgcttgtcacccggtagcccttgatgtcctcttcgttgaccaggatctccttagcaatctgtttcagtgtaggctttttcttctgcttaaacacgttttcgatgatctggaacttctcatagtattccagtttctcgttttcatccctggtgatgaccaggttgttcaggtcattcagggcgttgtacagatctgcgttataagcgtacttgacgcttctcagctcttctggaaaataggtgcaatgtcccatcagcatctcgtaccattccttgatgtctttccatccgaaggggctcccttctcctggtccctcatagtaggttctccgagtctccagcaggtcgatataagtatcgatgaagctctgatccagctggtggtaagccttctgcactttcagcagctgcttggcttctttgacgtagtcgcttgtcttgaacctattaattgaccctctcacctcgccatctttcttcagccgttccagctgcagctctgcgacatacttctcttccagagctttgctattgcgtgagatctgttcctttgtagacagctcgttgccggtgtcctcttccacctcattgacgttatgcactcctcggcgcttagccaggtgcagcagagctgcggaaaactcttcctctgacagcttctgactcaggcctttcaccctggcttcataaggattaattccactcagctcagaatggtcggtcagcaggttgtaatcgaacagcagtttcttcaccctctggattctgtgccttctccgtcgtttcaggcgcctggctcccctcttgcttctccgtccctcattgttttccacgttggcctccttgaacagtctgacgcctgcgtcgatcacgtcccttgtttcatagtcaataatcccataccccacgcttgtaatcccgatgtccagccccagaatgtagttccttttcatggacgcttcgaccttgcgctttttcttcggcatggtggcggctctccctatagtgagtcgtattagcggccgcgcccttggcctgtggcccgtccctgcccttgctggacgagagagaccgggccctgtcgagggttcctggggaccactgggaagcccctgggagaccggggctgacacagcaccaggcgaaatcccagccggggtcacggaggacgcttaggagtggcaagaaggtgctagaaaaagacaatcccctgagctgcttggaatccgattagatcattctgcccggccccttcctccaaggggccgcctcacttttcccctgagaaggacaaacaaccaccaggcttctggggcccactagtcaataatcaatgtcaacgcgtatatctggcccgtacatcgcgacttaagcgctagcggtaccaaaaaatctcgccaacaagttgacgagataaacacggcattttgccttgttttagtagatggtgtttcgtcctttccacaagatatataaagccaagaaatcgaaatactttcaagttacggtaagcatatgatagtccattttaaaacataattttaaaactgcaaactacccaagaaattattactttctacgtcacgtattttgtactaatatctttgtgtttacagtcaaattaattctaattatctctctaacagccttgtatcgtatatgcaaatatgaaggaatcatgggaaataggccctcttcctgcccgaccttccttcgatcgaactaagtcgaaaaaatctcgccaacaagttgacgagataaacacggcattttgccttgttttagtagattctgtttccagagtactaaaacnnnnnnnnnnnnnnnnnnnnnnnnnnggtgtttcgtcctttccacaagatatataaagccaagaaatcgaaatactttcaagttacggtaagcatatgatagtccattttaaaacataattttaaaactgcaaactacccaagaaattattactttctacgtcacgtattttgtactaatatctttgtgtttacagtcaaattaattctaattatctctctaacagccttgtatcgtatatgcaaatatgaaggaatcatgggaaataggccctcttcctgcccgaccttggtaccgaattcagatctgaggaacccctagtgatggagttggccactccctctctgcgcgctcgctcgctcactgaggccgcccgggcaaagcccgggcgtcgggcgacctttggtcgcccggcctcagtgagcgagcgagcgcgcagagagggagtggccaa

SEQ ID NO: 448 - DNA, 4731 bp, Artificial Sequence
  Exemplary recombinant AAV genome containing CRX promoter (3'->5' lower strand)
  misc_feature (3886)..(3911): a, c, g, or t
  misc_feature (4278)..(4303): a, c, g, or t
ttggccactccctctctgcgcgctcgctcgctcactgaggccgggcgaccaaaggtcgcccgacgcccgggctttgcccgggcggcctcagtgagcgagcgagcgcgcagagagggagtggccaactccatcactaggggttcctagatctctccccagcatgcatttaaatctagagttaacgccttttgctggccttttgctcacatgttctttcctgcgaagcttggacgcgcctgatcaaaaaaccaacacacgcttccaatgaaaataaacgatcctttattgctacttgtcatcgtcatccttgtaatcgatgtcatgatctttataatcaccgtcatggtctttgtagtcgctcgagactttcctcttcttcttgggggatccgccctttttgataatctgagggtgctttttgctcttcacctcatacaggtttcccagaatgtcggttgagtactttttgatactctgagtcttagaggcaattgttttgataattcgaggggggcgcttatcattcatgttttccagatactctcggtaagtgatgtcaatcatattcacttcaatgcggttcagcagatcattgttcaccccgatgaccctatacagttcgccattgatcttaatcaggtcgttgttgtaaaaggaggcgatgaactctgcctggttgctaatctttttcagctttttagcctcttcgtagcacttgctattcacttcatagtagttctcctttttgatgacatccagattcttgacagtcacaaatttatacacgccgttgtccagatagacatcgaatctgtatggcttcagtgacagcttgaccaccttgttgcgactgttagggtaatcgtctgtgatgtccagatgggcattcagcttgttcccatagtacttgatcttcttgatcacggggccattatcctttttgctatacttggtcaggtagttcccagtctcttcatagtacttatacagtgggttcttctcgtcgccgtactgctccataatcagcttcagtttctgatatgtctgaggatcatggtggtacatcagcagcttctcgggacttttgttgatcagctttttcagcttgtcattatctttgtcgtacagtccgttcagattgttcacaatcagggtattccccttatcgtcttttcttgtactatacagggtgtcattgatcagctctctgttgggctttttatccacccggtgagagtacttgtagtccttgaaatccttgatatgcttgatctggtgaggagtgatgaaaatctccttgtactcctgttctgtctcgatttcgggcatagattcggcctgcttctcttcgaacatctggttctccatcactttcttggctttgtccagctttttccactccttaaagatgaagtcggcatttgcgataatcagagcatcttcggcatggtgcttgtaccctttgttgcgctcctttttaaacttccatttgcgcctcagaaaagatgtgaacccgccgttgatggacttgactttcacatccagattgttcacccggaaataggatcgcagcagattcatcaggccgcgagtagcgtatcttgtgtccaccagattccggttaataaaatccttctggacggagaatctgttgatgtcccgctcttccagcaggtactcctttttggtcttgctgatgcggccctttcctttggccagattcagaatgtgctttttaaaggtttcgtaagagatcttggaatctgaactagacaggtactggaaaggagtcctattgccctttttagagttctcttcctgcttgaccagcaccttgttgttaaaggaattgtcgaaggacacgcttctggggataatatgatcgacctcgtagttgaatggattgttcagcaggtcctccagggggatggcctccagagaatacagacactttccctcctgcatatcgtgcagcttgattttttcaatcaggtactttgcgttctctttcccggtagttcggataatctcttcaatgcgttcattggtctgccggtttcgtttctgcatctcattgatcatcttctgtgcgtccttgctgttcttctccctagccagctcgataatgatatcattgggcaggccgtacttcttgatgatggcgttgatcactttgatgctctggatgaagctccgcttgaccacgggtgacagaatgaaatcgtccaccagtgtggttgggatctctttctgctgactcaggtccaccttttttgggaccagcttcagccggttaaagattgcaatctgattgtcgtttgtatgccacagctcatccagaatcagattgatagctttcagggacaggttgtgtgttccggtgtaccccttcagattactaatctgttcgatctcttcctgggtcagctcgctgttcaggttagtcagctcttcctggatgtcctcggagctctggtagatagtcaggatcttagcaatctgatccagcagttcggcgttctcaatgatttctttccgtgctgtgatgtccttaatatcgtgatacactttcagattggtgaactctggttttccagtgcttgtcacccggtagcccttgatgtcctcttcgttgaccaggatctccttagcaatctgtttcagtgtaggctttttcttctgcttaaacacgttttcgatgatctggaacttctcatagtattccagtttctcgttttcatccctggtgatgaccaggttgttcaggtcattcagggcgttgtacagatctgcgttataagcgtacttgacgcttctcagctcttctggaaaataggtgcaatgtcccatcagcatctcgtaccattccttgatgtctttccatccgaaggggctcccttctcctggtccctcatagtaggttctccgagtctccagcaggtcgatataagtatcgatgaagctctgatccagctggtggtaagccttctgcactttcagcagctgcttggcttctttgacgtagtcgcttgtcttgaacctattaattgaccctctcacctcgccatctttcttcagccgttccagctgcagctctgcgacatacttctcttccagagctttgctattgcgtgagatctgttcctttgtagacagctcgttgccggtgtcctcttccacctcattgacgttatgcactcctcggcgcttagccaggtgcagcagagctgcggaaaactcttcctctgacagcttctgactcaggcctttcaccctggcttcataaggattaattccactcagctcagaatggtcggtcagcaggttgtaatcgaacagcagtttcttcaccctctggattctgtgccttctccgtcgtttcaggcgcctggctcccctcttgcttctccgtccctcattgttttccacgttggcctccttgaacagtctgacgcctgcgtcgatcacgtcccttgtttcatagtcaataatcccataccccacgcttgtaatcccgatgtccagccccagaatgtagttccttttcatggacgcttcgaccttgcgctttttcttcggcatggtggcggctctccctatagtgagtcgtattagcggccgccgcccggtaatccctccttgtggctgggtcattgtgtctcagccataaggggccctttctttctcctcctccctcccccaaaccccctgctaggagagattaaggctacaggcactagtcaataatcaatgtcaacgcgtatatctggcccgtacatcgcgacttaagcgctagcggtaccaaaaaatctcgccaacaagttgacgagataaacacggcattttgccttgttttagtagattctgtttccagagtactaaaacnnnnnnnnnnnnnnnnnnnnnnnnnnggtgtttcgtcctttccacaagatatataaagccaagaaatcgaaatactttcaagttacggtaagcatatgatagtccattttaaaacataattttaaaactgcaaactacccaagaaattattactttctacgtcacgtattttgtactaatatctttgtgtttacagtcaaattaattctaattatctctctaacagccttgtatcgtatatgcaaatatgaaggaatcatgggaaataggccctcttcctgcccgaccttccttcgatcgaactaagtcgaaaaaatctcgccaacaagttgacgagataaacacggcattttgccttgttttagtagattctgtttccagagtactaaaacnnnnnnnnnnnnnnnnnnnnnnnnnnggtgtttcgtcctttccacaagatatataaagccaagaaatcgaaatactttcaagttacggtaagcatatgatagtccattttaaaacataattttaaaactgcaaactacccaagaaattattactttctacgtcacgtattttgtactaatatctttgtgtttacagtcaaattaattctaattatctctctaacagccttgtatcgtatatgcaaatatgaaggaatcatgggaaataggccctcttcctgcccgaccttggtaccgaattcagatctgaggaacccctagtgatggagttggccactccctctctgcgcgctcgctcgctcactgaggccgcccgggcaaagcccgggcgtcgggcgacctttggtcgcccggcctcagtgagcgagcgagcgcgcagagagggagtggccaa

SEQ ID NO: 449 - DNA, 4899 bp, Artificial Sequence
  Exemplary recombinant AAV genome containing NRL promoter (3'->5' lower strand)
  misc_feature (4054)..(4079): a, c, g, or t
  misc_feature (4446)..(4471): a, c, g, or t
ttggccactccctctctgcgcgctcgctcgctcactgaggccgggcgaccaaaggtcgcccgacgcccgggctttgcccgggcggcctcagtgagcgagcgagcgcgcagagagggagtggccaactccatcactaggggttcctagatctctccccagcatgcatttaaatctagagttaacgccttttgctggccttttgctcacatgttctttcctgcgaagcttggacgcgcctgatcaaaaaaccaacacacgcttccaatgaaaataaacgatcctttattgctacttgtcatcgtcatccttgtaatcgatgtcatgatctttataatcaccgtcatggtctttgtagtcgctcgagactttcctcttcttcttgggggatccgccctttttgataatctgagggtgctttttgctcttcacctcatacaggtttcccagaatgtcggttgagtactttttgatactctgagtcttagaggcaattgttttgataattcgaggggggcgcttatcattcatgttttccagatactctcggtaagtgatgtcaatcatattcacttcaatgcggttcagcagatcattgttcaccccgatgaccctatacagttcgccattgatcttaatcaggtcgttgttgtaaaaggaggcgatgaactctgcctggttgctaatctttttcagctttttagcctcttcgtagcacttgctattcacttcatagtagttctcctttttgatgacatccagattcttgacagtcacaaatttatacacgccgttgtccagatagacatcgaatctgtatggcttcagtgacagcttgaccaccttgttgcgactgttagggtaatcgtctgtgatgtccagatgggcattcagcttgttcccatagtacttgatcttcttgatcacggggccattatcctttttgctatacttggtcaggtagttcccagtctcttcatagtacttatacagtgggttcttctcgtcgccgtactgctccataatcagcttcagtttctgatatgtctgaggatcatggtggtacatcagcagcttctcgggacttttgttgatcagctttttcagcttgtcattatctttgtcgtacagtccgttcagattgttcacaatcagggtattccccttatcgtcttttcttgtactatacagggtgtcattgatcagctctctgttgggctttttatccacccggtgagagtacttgtagtccttgaaatccttgatatgcttgatctggtgaggagtgatgaaaatctccttgtactcctgttctgtctcgatttcgggcatagattcggcctgcttctcttcgaacatctggttctccatcactttcttggctttgtccagctttttccactccttaaagatgaagtcggcatttgcgataatcagagcatcttcggcatggtgcttgtaccctttgttgcgctcctttttaaacttccatttgcgcctcagaaaagatgtgaacccgccgttgatggacttgactttcacatccagattgttcacccggaaataggatcgcagcagattcatcaggccgcgagtagcgtatcttgtgtccaccagattccggttaataaaatccttctggacggagaatctgttgatgtcccgctcttccagcaggtactcctttttggtcttgctgatgcggccctttcctttggccagattcagaatgtgctttttaaaggtttcgtaagagatcttggaatctgaactagacaggtactggaaaggagtcctattgccctttttagagttctcttcctgcttgaccagcaccttgttgttaaaggaattgtcgaaggacacgcttctggggataatatgatcgacctcgtagttgaatggattgttcagcaggtcctccagggggatggcctccagagaatacagacactttccctcctgcatatcgtgcagcttgattttttcaatcaggtactttgcgttctctttcccggtagttcggataatctcttcaatgcgttcattggtctgccggtttcgtttctgcatctcattgatcatcttctgtgcgtccttgctgttcttctccctagccagctcgataatgatatcattgggcaggccgtacttcttgatgatggcgttgatcactttgatgctctggatgaagctccgcttgaccacgggtgacagaatgaaatcgtccaccagtgtggttgggatctctttctgctgactcaggtccaccttttttgggaccagcttcagccggttaaagattgcaatctgattgtcgtttgtatgccacagctcatccagaatcagattgatagctttcagggacaggttgtgtgttccggtgtaccccttcagattactaatctgttcgatctcttcctgggtcagctcgctgttcaggttagtcagctcttcctggatgtcctcggagctctggtagatagtcaggatcttagcaatctgatccagcagttcggcgttctcaatgatttctttccgtgctgtgatgtccttaatatcgtgatacactttcagattggtgaactctggttttccagtgcttgtcacccggtagcccttgatgtcctcttcgttgaccaggatctccttagcaatctgtttcagtgtaggctttttcttctgcttaaacacgttttcgatgatctggaacttctcatagtattccagtttctcgttttcatccctggtgatgaccaggttgttcaggtcattcagggcgttgtacagatctgcgttataagcgtacttgacgcttctcagctcttctggaaaataggtgcaatgtcccatcagcatctcgtaccattccttgatgtctttccatccgaaggggctcccttctcctggtccctcatagtaggttctccgagtctccagcaggtcgatataagtatcgatgaagctctgatccagctggtggtaagccttctgcactttcagcagctgcttggcttctttgacgtagtcgcttgtcttgaacctattaattgaccctctcacctcgccatctttcttcagccgttccagctgcagctctgcgacatacttctcttccagagctttgctattgcgtgagatctgttcctttgtagacagctcgttgccggtgtcctcttccacctcattgacgttatgcactcctcggcgcttagccaggtgcagcagagctgcggaaaactcttcctctgacagcttctgactcaggcctttcaccctggcttcataaggattaattccactcagctcagaatggtcggtcagcaggttgtaatcgaacagcagtttcttcaccctctggattctgtgccttctccgtcgtttcaggcgcctggctcccctcttgcttctccgtccctcattgttttccacgttggcctccttgaacagtctgacgcctgcgtcgatcacgtcccttgtttcatagtcaataatcccataccccacgcttgtaatcccgatgtccagccccagaatgtagttccttttcatggacgcttcgaccttgcgctttttcttcggcatggtggcggctctccctatagtgagtcgtattagcggccgcttaagcgggtcgctgcagggtcgctcggtgttcgaggccacacgcgtcaccttaatatgcgaatgtgtgtgtctctgcccctctctcctctctcactcattctagttcccagatggctgaggggtgacctacattttcagcctaatcccctaacacctcttagagctatcatccctgagtaggagtgggaacagggatactaggaattatccaaggagatgtttaaacctgtccgaagctgtttaaatagggtctatggagttaaaggccacttcctacctactagtcaataatcaatgtcaacgcgtatatctggcccgtacatcgcgacttaagcgctagcggtaccaaaaaatctcgccaacaagttgacgagataaacacggcattttgccttgttttagtagattctgtttccagagtactaaaacnnnnnnnnnnnnnnnnnnnnnnnnnnggtgtttcgtcctttccacaagatatataaagccaagaaatcgaaatactttcaagttacggtaagcatatgatagtccattttaaaacataattttaaaactgcaaactacccaagaaattattactttctacgtcacgtattttgtactaatatctttgtgtttacagtcaaattaattctaattatctctctaacagccttgtatcgtatatgcaaatatgaaggaatcatgggaaataggccctcttcctgcccgaccttccttcgatcgaactaagtcgaaaaaatctcgccaacaagttgacgagataaacacggcattttgccttgttttagtagattctgtttccagagtactaaaacnnnnnnnnnnnnnnnnnnnnnnnnnnggtgtttcgtcctttccacaagatatataaagccaagaaatcgaaatactttcaagttacggtaagcatatgatagtccattttaaaacataattttaaaactgcaaactacccaagaaattattactttctacgtcacgtattttgtactaatatctttgtgtttacagtcaaattaattctaattatctctctaacagccttgtatcgtatatgcaaatatgaaggaatcatgggaaataggccctcttcctgcccgaccttggtaccgaattcagatctgaggaacccctagtgatggagttggccactccctctctgcgcgctcgctcgctcactgaggccgcccgggcaaagcccgggcgtcgggcgacctttggtcgcccggcctcagtgagcgagcgagcgcgcagagagggagtggccaa

SEQ ID NO: 450 - DNA, 4853 bp, Artificial Sequence
  Exemplary recombinant AAV genome containing NRL promoter (3'->5' lower strand)
  misc_feature (4008)..(4033): a, c, g, or t
  misc_feature (4400)..(4425): a, c, g, or t
ttggccactccctctctgcgcgctcgctcgctcactgaggccgggcgaccaaaggtcgcccgacgcccgggctttgcccgggcggcctcagtgagcgagcgagcgcgcagagagggagtggccaactccatcactaggggttcctagatctctccccagcatgcatttaaatctagagttaacgccttttgctggccttttgctcacatgttctttcctgcgaagcttggacgcgcctgatcaaaaaaccaacacacgcttccaatgaaaataaacgatcctttattgctacttgtcatcgtcatccttgtaatcgatgtcatgatctttataatcaccgtcatggtctttgtagtcgctcgagactttcctcttcttcttgggggatccgccctttttgataatctgagggtgctttttgctcttcacctcatacaggtttcccagaatgtcggttgagtactttttgatactctgagtcttagaggcaattgttttgataattcgaggggggcgcttatcattcatgttttccagatactctcggtaagtgatgtcaatcatattcacttcaatgcggttcagcagatcattgttcaccccgatgaccctatacagttcgccattgatcttaatcaggtcgttgttgtaaaaggaggcgatgaactctgcctggttgctaatctttttcagctttttagcctcttcgtagcacttgctattcacttcatagtagttctcctttttgatgacatccagattcttgacagtcacaaatttatacacgccgttgtccagatagacatcgaatctgtatggcttcagtgacagcttgaccaccttgttgcgactgttagggtaatcgtctgtgatgtccagatgggcattcagcttgttcccatagtacttgatcttcttgatcacggggccattatcctttttgctatacttggtcaggtagttcccagtctcttcatagtacttatacagtgggttcttctcgtcgccgtactgctccataatcagcttcagtttctgatatgtctgaggatcatggtggtacatcagcagcttctcgggacttttgttgatcagctttttcagcttgtcattatctttgtcgtacagtccgttcagattgttcacaatcagggtattccccttatcgtcttttcttgtactatacagggtgtcattgatcagctctctgttgggctttttatccacccggtgagagtacttgtagtccttgaaatccttgatatgcttgatctggtgaggagtgatgaaaatctccttgtactcctgttctgtctcgatttcgggcatagattcggcctgcttctcttcgaacatctggttctccatcactttcttggctttgtccagctttttccactccttaaagatgaagtcggcatttgcgataatcagagcatcttcggcatggtgcttgtaccctttgttgcgctcctttttaaacttccatttgcgcctcagaaaagatgtgaacccgccgttgatggacttgactttcacatccagattgttcacccggaaataggatcgcagcagattcatcaggccgcgagtagcgtatcttgtgtccaccagattccggttaataaaatccttctggacggagaatctgttgatgtcccgctcttccagcaggtactcctttttggtcttgctgatgcggccctttcctttggccagattcagaatgtgctttttaaaggtttcgtaagagatcttggaatctgaactagacaggtactggaaaggagtcctattgccctttttagagttctcttcctgcttgaccagcaccttgttgttaaaggaattgtcgaaggacacgcttctggggataatatgatcgacctcgtagttgaatggattgttcagcaggtcctccagggggatggcctccagagaatacagacactttccctcctgcatatcgtgcagcttgattttttcaatcaggtactttgcgttctctttcccggtagttcggataatctcttcaatgcgttcattggtctgccggtttcgtttctgcatctcattgatcatcttctgtgcgtccttgctgttcttctccctagccagctcgataatgatatcattgggcaggccgtacttcttgatgatggcgttgatcactttgatgctctggatgaagctccgcttgaccacgggtgacagaatgaaatcgtccaccagtgtggttgggatctctttctgctgactcaggtccaccttttttgggaccagcttcagccggttaaagattgcaatctgattgtcgtttgtatgccacagctcatccagaatcagattgatagctttcagggacaggttgtgtgttccggtgtaccccttcagattactaatctgttcgatctcttcctgggtcagctcgctgttcaggttagtcagctcttcctggatgtcctcggagctctggtagatagtcaggatcttagcaatctgatccagcagttcggcgttctcaatgatttctttccgtgctgtgatgtccttaatatcgtgatacactttcagattggtgaactctggttttccagtgcttgtcacccggtagcccttgatgtcctcttcgttgaccaggatctccttagcaatctgtttcagtgtaggctttttcttctgcttaaacacgttttcgatgatctggaacttctcatagtattccagtttctcgttttcatccctggtgatgaccaggttgttcaggtcattcagggcgttgtacagatctgcgttataagcgtacttgacgcttctcagctcttctggaaaataggtgcaatgtcccatcagcatctcgtaccattccttgatgtctttccatccgaaggggctcccttctcctggtccctcatagtaggttctccgagtctccagcaggtcgatataagtatcgatgaagctctgatccagctggtggtaagccttctgcactttcagcagctgcttggcttctttgacgtagtcgcttgtcttgaacctattaattgaccctctcacctcgccatctttcttcagccgttccagctgcagctctgcgacatacttctcttccagagctttgctattgcgtgagatctgttcctttgtagacagctcgttgccggtgtcctcttccacctcattgacgttatgcactcctcggcgcttagccaggtgcagcagagctgcggaaaactcttcctctgacagcttctgactcaggcctttcaccctggcttcataaggattaattccactcagctcagaatggtcggtcagcaggttgtaatcgaacagcagtttcttcaccctctggattctgtgccttctccgtcgtttcaggcgcctggctcccctcttgcttctccgtccctcattgttttccacgttggcctccttgaacagtctgacgcctgcgtcgatcacgtcccttgtttcatagtcaataatcccataccccacgcttgtaatcccgatgtccagccccagaatgtagttccttttcatggacgcttcgaccttgcgctttttcttcggcatggtggcggctctccctatagtgagtcgtattagcggccgctgagtgaggaagagtgggcagcggctggggagtcgctgggtgggtgggacgtgcgtggtcccctggccgcaggctgggctcaaggctggtgtgagctgaagaccgagatgctggtggcttaggaggatttgcgaccagttcttcgcaatccttgaagggaggaggggcccaggagctttgtggagggcgggagcggtgggggggggtgctcccagaaccctagtgagattaaaatactagtcaataatcaatgtcaacgcgtatatctggcccgtacatcgcgacttaagcgctagcggtaccaaaaaatctcgccaacaagttgacgagataaacacggcattttgccttgttttagtagattctgtttccagagtactaaaacnnnnnnnnnnnnnnnnnnnnnnnnnnggtgtttcgtcctttccacaagatatataaagccaagaaatcgaaatactttcaagttacggtaagcatatgatagtccattttaaaacataattttaaaactgcaaactacccaagaaattattactttctacgtcacgtattttgtactaatatctttgtgtttacagtcaaattaattctaattatctctctaacagccttgtatcgtatatgcaaatatgaaggaatcatgggaaataggccctcttcctgcccgaccttccttcgatcgaactaagtcgaaaaaatctcgccaacaagttgacgagataaacacggcattttgccttgttttagtagattctgtttccagagtactaaaacnnnnnnnnnnnnnnnnnnnnnnnnnnggtgtttcgtcctttccacaagatatataaagccaagaaatcgaaatactttcaagttacggtaagcatatgatagtccattttaaaacataattttaaaactgcaaactacccaagaaattattactttctacgtcacgtattttgtactaatatctttgtgtttacagtcaaattaattctaattatctctctaacagccttgtatcgtatatgcaaatatgaaggaatcatgggaaataggccctcttcctgcccgaccttggtaccgaattcagatctgaggaacccctagtgatggagttggccactccctctctgcgcgctcgctcgctcactgaggccgcccgggcaaagcccgggcgtcgggcgacctttggtcgcccggcctcagtgagcgagcgagcgcgcagagagggagtggccaa

SEQ ID NO: 451 - protein, 8 aa, Artificial Sequence
  Flag tag (single)
DYKDDDDK

SEQ ID NO: 452 - protein, 9 aa, Artificial Sequence
  HA tag
YPYDVPDYA

SEQ ID NO: 453 - protein, 10 aa, Artificial Sequence
  Myc tag
EQKLISEEDL

SEQ ID NO: 454 - protein, 6 aa, Artificial Sequence
  His tag
HHHHHH

SEQ ID NO: 455 - DNA, 228 bp, Artificial Sequence
  bGH polyA
gctgcaggatgaccggtcatcatcaccatcaccattgagtttaaacccgctgatcagcctcgactgtgccttctagttgccagccatctgttgtttgcccctcccccgtgccttccttgaccctggaaggtgccactcccactgtcctttcctaataaaatgaggaaattgcatcgcattgtctgagtaggtgtcattctattctggggggtggggtggggcaggaca

SEQ ID NO: 456 - DNA, 134 bp, Artificial Sequence
  SV40 polyA
atgctttatttgtgaaatttgtgatgctattgctttatttgtaaccattataagctgcaataaacaagttaacaacaacaattgcattcattttatgtttcaggttcagggggaggtgtgggaggttttttaaa

SEQ ID NO: 457 - RNA, 17 nt, Artificial Sequence
  CEP290-B8/-89 targeting domain (RNA)
gcuaccgguuaccugaa

SEQ ID NO: 458 - RNA, 17 nt, Artificial Sequence
  CEP290-B217/-B1074/-86 targeting domain (RNA)
gcagaacuaguguagac

SEQ ID NO: 459 - RNA, 17 nt, Artificial Sequence
  CEP290-B69/-114 targeting domain (RNA)
guugaguaucuccuguu

SEQ ID NO: 460 - RNA, 20 nt, Artificial Sequence
  CEP290-496/-B115/-B1041/-85 targeting domain (RNA)
gaugcagaacuaguguagac

SEQ ID NO: 461 - RNA, 20 nt, Artificial Sequence
  CEP290-B187/-B1045/-91/-1505 targeting domain (RNA)
gcuugaacucugugccaaac

SEQ ID NO: 462 - RNA, 20 nt, Artificial Sequence
  CEP290-B473/-B1035/-67/-956 targeting domain (RNA)
gaaagaugaaaaauacucuu

SEQ ID NO: 463 - RNA, 17 nt, Artificial Sequence
  CEP290-68 targeting domain (RNA)
gaaauagauguagauug

SEQ ID NO: 464 - RNA, 20 nt, Artificial Sequence
  CEP290-70 targeting domain (RNA)
gaaauauuaagggcucuucc

SEQ ID NO: 465 - RNA, 20 nt, Artificial Sequence
  CEP290-71/-969 targeting domain (RNA)
gaacaaaagccagggaccau

SEQ ID NO: 466 - RNA, 20 nt, Artificial Sequence
  CEP290-B459/-72 targeting domain
gaacucuauaccuuuuacug

SEQ ID NO: 467 - RNA, 20 nt, Artificial Sequence
  CEP290-73/-1554 targeting domain (RNA)
gaagaauggaauagauaaua

SEQ ID NO: 468 - RNA, 20 nt, Artificial Sequence
  CEP290-74/-490 targeting domain (RNA)
gaauaguuuguucuggguac

SEQ ID NO: 469 - RNA, 17 nt, Artificial Sequence
  CEP290-75 targeting domain (RNA)
gaauggaauagauaaua

SEQ ID NO: 470 - RNA, 20 nt, Artificial Sequence
  CEP290-76 targeting domain (RNA)
gaauuuacagagugcaucca

SEQ ID NO: 471 - RNA, 20 nt, Artificial Sequence
  CEP290-77 targeting domain (RNA)
gagaaaaaggagcaugaaac

SEQ ID NO: 472 - RNA, 17 nt, Artificial Sequence
  CEP290-B283/-78 targeting domain (RNA)
gagagccacagugcaug

SEQ ID NO: 473 - RNA, 17 nt, Artificial Sequence
  CEP290-79 targeting domain (RNA)
gagguagaaucaagaag

SEQ ID NO: 474 - RNA, 17 nt, Artificial Sequence
  CEP290-80 targeting domain
gagugcauccauggucc

SEQ ID NO: 475 - RNA, 17 nt, Artificial Sequence
  CEP290-81 targeting domain (RNA)
gauaacuacaaaggguc

SEQ ID NO: 476 - RNA, 17 nt, Artificial Sequence
  CEP290-82/-B292 targeting domain (RNA)
gauagagacaggaauaa

SEQ ID NO: 477 - RNA, 17 nt, Artificial Sequence
  CEP290-B445/-B1069/-83 targeting domain (RNA)
gaugaaaaauacucuuu

SEQ ID NO: 478 - RNA, 17 nt, Artificial Sequence
  CEP290-B50/-B1070/-84 targeting domain (RNA)
gaugacaugagguaagu

SEQ ID NO: 479 - RNA, 17 nt, Artificial Sequence
  CEP290-B87/-87 targeting domain (RNA)
gcauguggugucaaaua

SEQ ID NO: 480 - RNA, 20 nt, Artificial Sequence
  CEP290-B182/-B1044/-88/-500 targeting domain (RNA)
gccugaacaaguuuugaaac

SEQ ID NO: 481 - RNA, 17 nt, Artificial Sequence
  CEP290-B85/-B1075/-90 targeting domain (RNA)
gcucuuuucuauauaua

SEQ ID NO: 482 - RNA, 20 nt, Artificial Sequence
  CEP290-B241/-B1048/-92/-1524 targeting domain (RNA)
gcuuuugacaguuuuuaagg

SEQ ID NO: 483 - RNA, 17 nt, Artificial Sequence
  CEP290-93 targeting domain (RNA)
gcuuuuguuccuuggaa

SEQ ID NO: 484 - RNA, 20 nt, Artificial Sequence
  CEP290-94/-1283 targeting domain (RNA)
ggaacaaaagccagggacca

SEQ ID NO: 485 - RNA, 20 nt, Artificial Sequence
  CEP290-B278/-95 targeting domain (RNA)
ggacuugacuuuuacccuuc

SEQ ID NO: 486 - RNA, 17 nt, Artificial Sequence
  CEP290-96 targeting domain (RNA)
ggagaauaguuuguucu

SEQ ID NO: 487 - RNA, 20 nt, Artificial Sequence
  CEP290-B67/-97 targeting domain (RNA)
ggagucacaugggagucaca

SEQ ID NO: 488 - RNA, 17 nt, Artificial Sequence
  CEP290-B444/-B1076/-98 targeting domain (RNA)
ggauaggacagaggaca

SEQ ID NO: 489 - RNA, 20 nt, Artificial Sequence
  CEP290-99 targeting domain (RNA)
ggcuguaagauaacuacaaa

SEQ ID NO: 490 - RNA, 17 nt, Artificial Sequence
  CEP290-100 targeting domain (RNA)
gggagaauaguuuguuc

SEQ ID NO: 491 - RNA, 20 nt, Artificial Sequence
  CEP290-B227/-101 targeting domain (RNA)
gggagucacaugggagucac

SEQ ID NO: 492 - RNA, 17 nt, Artificial Sequence
  CEP290-102 targeting domain (RNA)
gggcucuuccuggacca

SEQ ID NO: 493 - RNA, 20 nt, Artificial Sequence
  CEP290-103 targeting domain (RNA)
ggguacagggguaagagaaa

SEQ ID NO: 494 - RNA, 20 nt, Artificial Sequence
  CEP290-104/-489 targeting domain (RNA)
ggucccuggcuuuuguuccu

SEQ ID NO: 495 - RNA, 20 nt, Artificial Sequence
  CEP290-105 targeting domain (RNA)
guaaagguucaugagacuag

SEQ ID NO: 496 - RNA, 20 nt, Artificial Sequence
  CEP290-B465/-B528/-106 targeting domain (RNA)
guaacauaaucaccucucuu

SEQ ID NO: 497 - RNA, 20 nt, Artificial Sequence
  CEP290-B216/-B1054/-107/-503 targeting domain (RNA)
guaagacuggagauagagac

SEQ ID NO: 498 - RNA, 17 nt, Artificial Sequence
  CEP290-108 targeting domain (RNA)
guacagggguaagagaa

SEQ ID NO: 499 - RNA, 20 nt, Artificial Sequence
  CEP290-B259/-109 targeting domain (RNA)
guagcuuuugacaguuuuua

SEQ ID NO: 500 - RNA, 17 nt, Artificial Sequence
  CEP290-B260/-110 targeting domain (RNA)
gucacaugggagucaca

SEQ ID NO: 501 - RNA, 20 nt, Artificial Sequence
  CEP290-B261/-111 targeting domain (RNA)
guggagagccacagugcaug

SEQ ID NO: 502 - RNA, 17 nt, Artificial Sequence
  CEP290-112 targeting domain (RNA)
guuacaaucugugaaua

SEQ ID NO: 503 - RNA, 17 nt, Artificial Sequence
  CEP290-B436/-113 targeting domain (RNA)
guucuguccucaguaaa

SEQ ID NO: 504 - RNA, 20 nt, Artificial Sequence
  CEP290-B161/-115 targeting domain (RNA)
guuuagaaugaucauucuug

SEQ ID NO: 505 - RNA, 17 nt, Artificial Sequence
  CEP290-116 targeting domain (RNA)
guuuguucuggguacag

SEQ ID NO: 506 - RNA, 20 nt, Artificial Sequence
  CEP290-B2/-117 targeting domain (RNA)
uaaaaacugucaaaagcuac

SEQ ID NO: 507 - RNA, 20 nt, Artificial Sequence
  CEP290-118 targeting domain (RNA)
uaaaagguauagaguucaag

SEQ ID NO: 508 - RNA, 20 nt, Artificial Sequence
  CEP290-119/-987 targeting domain (RNA)
uaaaucaugcaagugaccua

SEQ ID NO: 509 - RNA, 20 nt, Artificial Sequence
  CEP290-120 targeting domain (RNA)
uaagauaacuacaaaggguc

SEQ ID NO: 510 - RNA, 17 nt, Artificial Sequence
  CEP290-B1008/-B1059 targeting domain (RNA)
gaauccugaaagcuacu

SEQ ID NO: 511 - RNA, 24 nt, Artificial Sequence
  CEP290-284 targeting domain (RNA)
gcuaaaucaugcaagugaccuaag

SEQ ID NO: 512 - RNA, 19 nt, Artificial Sequence
  CEP290-487 targeting domain (RNA)
ggucacuugcaugauuuag

SEQ ID NO: 513 - RNA, 18 nt, Artificial Sequence
  CEP290-486 targeting domain (RNA)
gucacuugcaugauuuag

SEQ ID NO: 514 - RNA, 23 nt, Artificial Sequence
  CEP290-285 targeting domain (RNA)
gccuaggacuuucuaaugcugga

SEQ ID NO: 515 - RNA, 18 nt, Artificial Sequence
  CEP290-479 targeting domain (RNA)
ggacuuucuaaugcugga

SEQ ID NO: 516 - RNA, 24 nt, Artificial Sequence
  CEP290-286 targeting domain (RNA)
gggaccaugggagaauaguuuguu

SEQ ID NO: 517 - RNA, 23 nt, Artificial Sequence
  CEP290-287 targeting domain (RNA)
ggaccaugggagaauaguuuguu

SEQ ID NO: 518 - RNA, 22 nt, Artificial Sequence
  CEP290-288 targeting domain (RNA)
gaccaugggagaauaguuuguu

SEQ ID NO: 519 - RNA, 24 nt, Artificial Sequence
  CEP290-289 targeting domain (RNA)
ggucccuggcuuuuguuccuugga

SEQ ID NO: 520 - RNA, 23 nt, Artificial Sequence
  CEP290-290 targeting domain (RNA)
gucccuggcuuuuguuccuugga

SEQ ID NO: 521 - RNA, 24 nt, Artificial Sequence
  CEP290-374 targeting domain (RNA)
gaaaacguuguucugaguagcuuu

SEQ ID NO: 522 - RNA, 18 nt, Artificial Sequence
  CEP290-478 targeting domain (RNA)
guuguucugaguagcuuu

SEQ ID NO: 523 - RNA, 19 nt, Artificial Sequence
  CEP290-488 targeting domain (RNA)
gucccuggcuuuuguuccu

SEQ ID NO: 524 - RNA, 23 nt, Artificial Sequence
  CEP290-291 targeting domain (RNA)
gacaucuuguggauaauguauca

SEQ ID NO: 525 - RNA, 21 nt, Artificial Sequence
  CEP290-292 targeting domain (RNA)
guccuaggcaagagacaucuu

SEQ ID NO: 526 - RNA, 23 nt, Artificial Sequence
  CEP290-293 targeting domain (RNA)
gccagcaaaagcuuuugagcuaa

SEQ ID NO: 527 - RNA, 19 nt, Artificial Sequence
  CEP290-481 targeting domain (RNA)
gcaaaagcuuuugagcuaa

SEQ ID NO: 528 - RNA, 21 nt, Artificial Sequence
  CEP290-294 targeting domain (RNA)
gaucuuauucuacuccuguga

SEQ ID NO: 529 - RNA, 23 nt, Artificial Sequence
  CEP290-295 targeting domain (RNA)
gcuuucaggauuccuacuaaauu

SEQ ID NO: 530 - RNA, 22 nt, Artificial Sequence
  CEP290-323 targeting domain (RNA)
guucuguccucaguaaaaggua

SEQ ID NO: 531 - RNA, 18 nt, Artificial Sequence
  CEP290-480 targeting domain (RNA)
gaacaacguuuucauuua

SEQ ID NO: 532 - RNA, 24 nt, Artificial Sequence
  CEP290-296 targeting domain (RNA)
guagaauaucauaaguuacaaucu

SEQ ID NO: 533 - RNA, 21 nt, Artificial Sequence
  CEP290-297 targeting domain (RNA)
gaauaucauaaguuacaaucu

SEQ ID NO: 534 - RNA, 20 nt, Artificial Sequence
  CEP290-298 targeting domain (RNA)
guggcuguaagauaacuaca

SEQ ID NO: 535 - RNA, 18 nt, Artificial Sequence
  CEP290-299 targeting domain (RNA)
ggcuguaagauaacuaca

SEQ ID NO: 536 - RNA, 22 nt, Artificial Sequence
  CEP290-300 targeting domain (RNA)
guuuaacguuaucauuuuccca

SEQ ID NO: 537 - RNA, 24 nt, Artificial Sequence
  CEP290-301 targeting domain (RNA)
guaagagaaagggaugggcacuua

SEQ ID NO: 538 - RNA, 20 nt, Artificial Sequence
  CEP290-492 targeting domain (RNA)
gagaaagggaugggcacuua

SEQ ID NO: 539 - RNA, 18 nt, Artificial Sequence
  CEP290-491 targeting domain (RNA)
gaaagggaugggcacuua

SEQ ID NO: 540 - RNA, 18 nt, Artificial Sequence
  CEP290-483 targeting domain (RNA)
guaaaugaaaacguuguu

SEQ ID NO: 541 - RNA, 24 nt, Artificial Sequence
  CEP290-302 targeting domain (RNA)
gauaaacaugacucauaauuuagu

SEQ ID NO: 542 - RNA, 23 nt, Artificial Sequence
  CEP290-303 targeting domain (RNA)
ggaacaaaagccagggaccaugg

SEQ ID NO: 543 - RNA, 22 nt, Artificial Sequence
  CEP290-304 targeting domain (RNA)
gaacaaaagccagggaccaugg

SEQ ID NO: 544 - RNA, 24 nt, Artificial Sequence
  CEP290-305 targeting domain (RNA)
gggagaauaguuuguucuggguac

SEQ ID NO: 545 - RNA, 23 nt, Artificial Sequence
  CEP290-306 targeting domain (RNA)
ggagaauaguuuguucuggguac

SEQ ID NO: 546 - RNA, 22 nt, Artificial Sequence
  CEP290-307 targeting domain (RNA)
gagaauaguuuguucuggguac

SEQ ID NO: 547 - RNA, 20 nt, Artificial Sequence
  CEP290-B1036/-482 targeting domain (RNA)
gaaauagaggcuuauggauu

SEQ ID NO: 548 - RNA, 24 nt, Artificial Sequence
  CEP290-308 targeting domain (RNA)
guucuggguacagggguaagagaa

SEQ ID NO: 549 - RNA, 19 nt, Artificial Sequence
  CEP290-494 targeting domain (RNA)
ggguacagggguaagagaa

SEQ ID NO: 550 - RNA, 18 nt, Artificial Sequence
  CEP290-493 targeting domain (RNA)
gguacagggguaagagaa

SEQ ID NO: 551 - RNA, 24 nt, Artificial Sequence
  CEP290-309 targeting domain (RNA)
guaaauucucaucauuuuuuauug

SEQ ID NO: 552 - RNA, 24 nt, Artificial Sequence
  CEP290-310 targeting domain (RNA)
ggagaggauaggacagaggacaug

SEQ ID NO: 553 - RNA, 23 nt, Artificial Sequence
  CEP290-311 targeting domain (RNA)
gagaggauaggacagaggacaug

SEQ ID NO: 554 - RNA, 21 nt, Artificial Sequence
  CEP290-313 targeting domain (RNA)
gaggauaggacagaggacaug

SEQ ID NO: 555 - RNA, 19 nt, Artificial Sequence
  CEP290-485 targeting domain (RNA)
ggauaggacagaggacaug

SEQ ID NO: 556 - RNA, 18 nt, Artificial Sequence
  CEP290-484 targeting domain (RNA)
gauaggacagaggacaug

SEQ ID NO: 557 - RNA, 22 nt, Artificial Sequence
  CEP290-314 targeting domain (RNA)
gaauaaauguagaauuuuaaug

SEQ ID NO: 558 - RNA, 22 nt, Artificial Sequence
  CEP290-64 targeting domain (RNA)
gucaaaagcuaccgguuaccug

SEQ ID NO: 559 - RNA, 23 nt, Artificial Sequence
  CEP290-315 targeting domain (RNA)
guuuuuaaggcggggagucacau

SEQ ID NO: 560 - RNA, 24 nt, Artificial Sequence
  CEP290-203 targeting domain (RNA)
gucuuacauccuccuuacugccac

SEQ ID NO: 561 - RNA, 24 nt, Artificial Sequence
  CEP290-316 targeting domain (RNA)
gagucacaggguaggauucauguu

SEQ ID NO: 562 - RNA, 22 nt, Artificial Sequence
  CEP290-317 targeting domain (RNA)
gucacaggguaggauucauguu

SEQ ID NO: 563 - RNA, 24 nt, Artificial Sequence
  CEP290-318 targeting domain (RNA)
ggcacagaguucaagcuaauacau

SEQ ID NO: 564 - RNA, 23 nt, Artificial Sequence
  CEP290-319 targeting domain (RNA)
gcacagaguucaagcuaauacau

SEQ ID NO: 565 - RNA, 18 nt, Artificial Sequence
  CEP290-505 targeting domain (RNA)
gaguucaagcuaauacau

SEQ ID NO: 566 - RNA, 24 nt, Artificial Sequence
  CEP290-320 targeting domain (RNA)
guguugaguaucuccuguuuggca

SEQ ID NO: 567 - RNA, 22 nt, Artificial Sequence
  CEP290-321 targeting domain (RNA)
guugaguaucuccuguuuggca

SEQ ID NO: 568 - RNA, 19 nt, Artificial Sequence
  CEP290-504 targeting domain (RNA)
gaguaucuccuguuuggca

SEQ ID NO: 569 - RNA, 21 nt, Artificial Sequence
  CEP290-322 targeting domain (RNA)
gaaaaucagauuucaugugug

SEQ ID NO: 570 - RNA, 24 nt, Artificial Sequence
  CEP290-324 targeting domain (RNA)
gccacaagaaugaucauucuaaac

SEQ ID NO: 571 - RNA, 23 nt, Artificial Sequence
  CEP290-325 targeting domain (RNA)
ggcggggagucacaugggaguca

SEQ ID NO: 572 - RNA, 22 nt, Artificial Sequence
  CEP290-326 targeting domain (RNA)
gcggggagucacaugggaguca

SEQ ID NO: 573 - RNA, 20 nt, Artificial Sequence
  CEP290-B1051/-499 targeting domain (RNA)
ggggagucacaugggaguca

SEQ ID NO: 574 - RNA, 19 nt, Artificial Sequence
  CEP290-498 targeting domain (RNA)
gggagucacaugggaguca

SEQ ID NO: 575 - RNA, 18 nt, Artificial Sequence
  CEP290-497 targeting domain (RNA)
ggagucacaugggaguca

SEQ ID NO: 576 - RNA, 22 nt, Artificial Sequence
  CEP290-327 targeting domain (RNA)
gcuuuugacaguuuuuaaggcg

SEQ ID NO: 577 - RNA, 21 nt, Artificial Sequence
  CEP290-328 targeting domain (RNA)
gaucauucuuguggcaguaag

SEQ ID NO: 578 - RNA, 18 nt, Artificial Sequence
  CEP290-329 targeting domain (RNA)
gagcaagagaugaacuag

SEQ ID NO: 579 - RNA, 23 nt, Artificial Sequence
  CEP290-330 targeting domain (RNA)
guagauugagguagaaucaagaa

SEQ ID NO: 580 - RNA, 20 nt, Artificial Sequence
  CEP290-506 targeting domain (RNA)
gauugagguagaaucaagaa

SEQ ID NO: 581 - RNA, 24 nt, Artificial Sequence
  CEP290-331 targeting domain (RNA)
ggauguaagacuggagauagagac

SEQ ID NO: 582 - RNA, 23 nt, Artificial Sequence
  CEP290-332 targeting domain (RNA)
gauguaagacuggagauagagac

SEQ ID NO: 583 - RNA, 24 nt, Artificial Sequence
  CEP290-333 targeting domain (RNA)
gggagucacaugggagucacaggg

SEQ ID NO: 584 - RNA, 23 nt, Artificial Sequence
  CEP290-334 targeting domain (RNA)
ggagucacaugggagucacaggg

SEQ ID NO: 585 - RNA, 22 nt, Artificial Sequence
  CEP290-335 targeting domain (RNA)
gagucacaugggagucacaggg

SEQ ID NO: 586 - RNA, 20 nt, Artificial Sequence
  CEP290-502/-B1055 targeting domain (RNA)
gucacaugggagucacaggg

SEQ ID NO: 587 - RNA, 23 nt, Artificial Sequence
  CEP290-336 targeting domain (RNA)
guuuacauaucugucuuccuuaa

SEQ ID NO: 588 - RNA, 18 nt, Artificial Sequence
  CEP290-507 targeting domain (RNA)
gauuucaugugugaagaa

SEQ ID NO: 589 - RNA, 20 nt, Artificial Sequence
  CEP290-B65/-1936 targeting domain (RNA)
gaguucaagcuaauacauga

SEQ ID NO: 590 - RNA, 17 nt, Artificial Sequence
  CEP290-B296/-B536/-1934 targeting domain (RNA)
guuguucugaguagcuu

SEQ ID NO: 591 - RNA, 20 nt, Artificial Sequence
  CEP290-B308/-B482/-1932 targeting domain (RNA)
ggcaaaagcagcagaaagca

SEQ ID NO: 592 - RNA, 17 nt, Artificial Sequence
  CEP290-1933 targeting domain (RNA)
guggcugaaugacuucu

SEQ ID NO: 593 - RNA, 17 nt, Artificial Sequence
  CEP290-1935 targeting domain (RNA)
gacuagaggucacgaaa

SEQ ID NO: 594 - RNA, 17 nt, Artificial Sequence
  CEP290-B6/-B106/-220 targeting domain (RNA)
cucauaccuaucccuau

SEQ ID NO: 595 - RNA, 17 nt, Artificial Sequence
  CEP290-B20/-B55/-152 targeting domain (RNA)
acacugccaauagggau

SEQ ID NO: 596 - RNA, 17 nt, Artificial Sequence
  CEP290-B10 targeting domain (RNA)
caauuacaacuggggcc

SEQ ID NO: 597 - RNA, 17 nt, Artificial Sequence
  CEP290-B21/-B92/-216 targeting domain (RNA)
cuaagacacugccaaua

SEQ ID NO: 598 - RNA, 17 nt, Artificial Sequence
  CEP290-B9/-B1005 targeting domain (RNA)
auacucacaauuacaac

SEQ ID NO: 599 - RNA, 20 nt, Artificial Sequence
  CEP290-B1/-B138 targeting domain (RNA)
uaucucauaccuaucccuau

SEQ ID NO: 600 - RNA, 20 nt, Artificial Sequence
  CEP290-B29/-B253/-140 targeting domain (RNA)
aagacacugccaauagggau

SEQ ID NO: 601 - RNA, 20 nt, Artificial Sequence
  CEP290-B5 targeting domain (RNA)
ucacaauuacaacuggggcc

SEQ ID NO: 602 - RNA, 20 nt, Artificial Sequence
  CEP290-B30 targeting domain (RNA)
agauacucacaauuacaacu

SEQ ID NO: 603 - RNA, 17 nt, Artificial Sequence
  CEP290-B22/-B44/-B1224/-253 targeting domain (RNA)
acuaagacacugccaau

SEQ ID NO: 604 - RNA, 17 nt, Artificial Sequence
  CEP290-B23 targeting domain (RNA)
uacucacaauuacaacu

SEQ ID NO: 605 - RNA, 17 nt, Artificial Sequence
  CEP290-B24 targeting domain (RNA)
acucacaauuacaacug

SEQ ID NO: 606 - RNA, 17 nt, Artificial Sequence
  CEP290-B25 targeting domain (RNA)
acaacuggggccaggug

SEQ ID NO: 607 - RNA, 17 nt, Artificial Sequence
  CEP290-B26 targeting domain (RNA)
acuggggccaggugcgg

SEQ ID NO: 608 - RNA, 17 nt, Artificial Sequence
  CEP290-B27 targeting domain (RNA)
augugagccaccgcacc

SEQ ID NO: 609 - RNA, 20 nt, Artificial Sequence
  CEP290-B31/-B151/-127 targeting domain (RNA)
aaacuaagacacugccaaua

SEQ ID NO: 610 - RNA, 20 nt, Artificial Sequence
  CEP290-B32/-B196/-B1086/-38/-122/-619 targeting domain (RNA)
aaaacuaagacacugccaau

SEQ ID NO: 611 - RNA, 20 nt, Artificial Sequence
  CEP290-B33 targeting domain (RNA)
auuacaacuggggccaggug

SEQ ID NO: 612 - RNA, 20 nt, Artificial Sequence
  CEP290-B34 targeting domain (RNA)
acaacuggggccaggugcgg

SEQ ID NO: 613 - RNA, 20 nt, Artificial Sequence
  CEP290-B1002/-B1131/-509 targeting domain (RNA)
cacugccaauagggauaggu

SEQ ID NO: 614 - RNA, 17 nt, Artificial Sequence
  CEP290-B1003/-B1299 targeting domain (RNA)
ugccaauagggauaggu

SEQ ID NO: 615 - RNA, 20 nt, Artificial Sequence
  CEP290-B1004 targeting domain (RNA)
ugagauacucacaauuacaa

SEQ ID NO: 616 - RNA, 20 nt, Artificial Sequence
  CEP290-B1006/-512 targeting domain (RNA)
accuggccccaguuguaauu

SEQ ID NO: 617 - RNA, 17 nt, Artificial Sequence
  CEP290-B1007 targeting domain (RNA)
uggccccaguuguaauu

SEQ ID NO: 618 - RNA, 17 nt, Artificial Sequence
  CEP290-B269/-166 targeting domain (RNA)
agcuaccgguuaccuga

SEQ ID NO: 619 - RNA, 20 nt, Artificial Sequence
  CEP290-B285/-B1017/-656 targeting domain (RNA)
uuuaaggcggggagucacau

SEQ ID NO: 620 - RNA, 20 nt, Artificial Sequence
  CEP290-B3/-131 targeting domain (RNA)
aaagcuaccgguuaccugaa

SEQ ID NO: 621 - RNA, 20 nt, Artificial Sequence
  CEP290-B207/-124 targeting domain (RNA)
aaaagcuaccgguuaccuga

SEQ ID NO: 622 - RNA, 20 nt, Artificial Sequence
  CEP290-B62/-B1101/-156/-1378 targeting domain (RNA)
acgugcucuuuucuauauau

SEQ ID NO: 623 - RNA, 20 nt, Artificial Sequence
  CEP290-B121/-197 targeting domain (RNA)
auuugacaccacaugcacug

SEQ ID NO: 624 - RNA, 20 nt, Artificial Sequence
  CEP290-B120/-B1149/-214/-1711 targeting domain (RNA)
cgugcucuuuucuauauaua

SEQ ID NO: 625 - RNA, 20 nt, Artificial Sequence
  CEP290-B36/-B1191/-1579 targeting domain (RNA)
uggugucaaauauggugcuu

SEQ ID NO: 626 - RNA, 20 nt, Artificial Sequence
  CEP290-B236/-158 targeting domain (RNA)
acuuuuacccuucagguaac

SEQ ID NO: 627 - RNA, 20 nt, Artificial Sequence
  CEP290-B70/-176 targeting domain (RNA)
agugcauguggugucaaaua

SEQ ID NO: 628 - RNA, 20 nt, Artificial Sequence
  CEP290-B177/-B1166/-1584 targeting domain (RNA)
uacaugagagugauuagugg

SEQ ID NO: 629 - RNA, 20 nt, Artificial Sequence
  CEP290-B451/-B498/-215 targeting domain (RNA)
cguuguucugaguagcuuuc

SEQ ID NO: 630 - RNA, 20 nt, Artificial Sequence
  CEP290-B452/-212 targeting domain (RNA)
ccacaagaugucucuugccu

SEQ ID NO: 631 - RNA, 20 nt, Artificial Sequence
  CEP290-B453/-213 targeting domain (RNA)
ccuaggcaagagacaucuug

SEQ ID NO: 632 - RNA, 20 nt, Artificial Sequence
  CEP290-B454/-B1189/-1006 targeting domain (RNA)
ugccuaggacuuucuaaugc

SEQ ID NO: 633 - RNA, 20 nt, Artificial Sequence
  CEP290-B523/-B456/-193 targeting domain (RNA)
auuagcucaaaagcuuuugc

SEQ ID NO: 634 - RNA, 17 nt, Artificial Sequence
  CEP290-B78/-237 targeting domain (RNA)
gcuuuugacaguuuuua

SEQ ID NO: 635 - RNA, 20 nt, Artificial Sequence
  CEP290-B79/-238 targeting domain (RNA)
ggagauagagacaggaauaa

SEQ ID NO: 636 - RNA, 17 nt, Artificial Sequence
  CEP290-B233/-B1021/-248 targeting domain (RNA)
aaggcggggagucacau

SEQ ID NO: 637 - RNA, 17 nt, Artificial Sequence
  CEP290-B175/-B1023 targeting domain (RNA)
uaaggcggggagucaca

SEQ ID NO: 638 - RNA, 17 nt, Artificial Sequence
  CEP290-B280/-B1295 targeting domain (RNA)
ugaacucugugccaaac

SEQ ID NO: 639 - RNA, 17 nt, Artificial Sequence
  CEP290-B268 targeting domain (RNA)
uuuacccuucagguaac

SEQ ID NO: 640 - RNA, 17 nt, Artificial Sequence
  CEP290-B154 targeting domain (RNA)
ugacaccacaugcacug

SEQ ID NO: 641 - RNA, 17 nt, Artificial Sequence
  CEP290-B231 targeting domain (RNA)
uugcucuagaugacaug

SEQ ID NO: 642 - RNA, 17 nt, Artificial Sequence
  CEP290-B242/-B1296 targeting domain (RNA)
ugacaguuuuuaaggcg

SEQ ID NO: 643 - RNA, 17 nt, Artificial Sequence
  CEP290-B226/-B1302 targeting domain (RNA)
ugucaaauauggugcuu

SEQ ID NO: 644 - RNA, 17 nt, Artificial Sequence
  CEP290-B159/-175 targeting domain (RNA)
agucacaugggagucac

SEQ ID NO: 645 - RNA, 17 nt, Artificial Sequence
  CEP290-B222/-B1259/-190 targeting domain (RNA)
augagagugauuagugg

SEQ ID NO: 646 - RNA, 17 nt, Artificial Sequence
  CEP290-B274 targeting domain (RNA)
ugacaugagguaaguag

SEQ ID NO: 647 - RNA, 17 nt, Artificial Sequence
  CEP290-B68 targeting domain (RNA)
uacaugagagugauuag

SEQ ID NO: 648 - RNA, 17 nt, Artificial Sequence
  CEP290-B212/-B1282 targeting domain (RNA)
uaaggaggauguaagac

SEQ ID NO: 649 - RNA, 17 nt, Artificial Sequence
  CEP290-B270/-233 targeting domain (RNA)
cuugacuuuuacccuuc

SEQ ID NO: 650 - RNA, 17 nt, Artificial Sequence
  CEP290-B96/-B1290 targeting domain (RNA)
ucacugagcaaaacaac

SEQ ID NO: 651 - RNA, 17 nt, Artificial Sequence
  CEP290-B104/-B1227/-161 targeting domain (RNA)
agacuuauauuccauua

SEQ ID NO: 652 - RNA, 17 nt, Artificial Sequence
  CEP290-B122/-210 targeting domain (RNA)
caugggagucacagggu

SEQ ID NO: 653 - RNA, 17 nt, Artificial Sequence
  CEP290-B229 targeting domain (RNA)
uagaaugaucauucuug

SEQ ID NO: 654 - RNA, 17 nt, Artificial Sequence
  CEP290-B99/-B1314 targeting domain (RNA)
uugacaguuuuuaaggc

SEQ ID NO: 655 - RNA, 17 nt, Artificial Sequence
  CEP290-B7/-128 targeting domain (RNA)
aaacugucaaaagcuac

SEQ ID NO: 656 - RNA, 17 nt, Artificial Sequence
  CEP290-B37/-B1256/-188 targeting domain (RNA)
augacaugagguaagua

SEQ ID NO: 657 - RNA, 17 nt, Artificial Sequence
  CEP290-B97 targeting domain (RNA)
uguuucaaaacuuguuc

SEQ ID NO: 658 - RNA, 17 nt, Artificial Sequence
  CEP290-B173/-B1250/-182 targeting domain (RNA)
auaucugucuuccuuaa

SEQ ID NO: 659 - RNA, 17 nt, Artificial Sequence
  CEP290-B136/-B1294/-276 targeting domain (RNA)
ugaacaaguuuugaaac

SEQ ID NO: 660 - RNA, 17 nt, Artificial Sequence
  CEP290-B71 targeting domain (RNA)
uucugcaucuuauacau

SEQ ID NO: 661 - RNA, 17 nt, Artificial Sequence
  CEP290-B172/-B1244/-179 targeting domain (RNA)
auaagucuuuugauaua

SEQ ID NO: 662 - RNA, 17 nt, Artificial Sequence
  CEP290-B238/-B1318 targeting domain (RNA)
uuugacaguuuuuaagg

SEQ ID NO: 663 - RNA, 17 nt, Artificial Sequence
  CEP290-B148/-B1300 targeting domain (RNA)
ugcucuuuucuauauau

SEQ ID NO: 664 - RNA, 17 nt, Artificial Sequence
  CEP290-B208/-B1226/-255 targeting domain (RNA)
agacuggagauagagac

SEQ ID NO: 665 - RNA, 17 nt, Artificial Sequence
  CEP290-B53/-208 targeting domain (RNA)
cauaagaaagaacacug

SEQ ID NO: 666 - RNA, 17 nt, Artificial Sequence
  CEP290-B166/-280 targeting domain (RNA)
uucuuguggcaguaagg

SEQ ID NO: 667 - RNA, 17 nt, Artificial Sequence
  CEP290-B247/-B1215/-247 targeting domain (RNA)
aagcauacuuuuuuuaa

SEQ ID NO: 668 - RNA, 17 nt, Artificial Sequence
  CEP290-B245/-261 targeting domain (RNA)
caacuggaagagagaaa

SEQ ID NO: 669 - RNA, 17 nt, Artificial Sequence
  CEP290-B167/-272 targeting domain (RNA)
uaugcuuaagaaaaaaa

SEQ ID NO: 670 - RNA, 17 nt, Artificial Sequence
  CEP290-B171/-283 targeting domain (RNA)
uuuuauuaucuuuauug

SEQ ID NO: 671 - RNA, 20 nt, Artificial Sequence
  CEP290-B140/-B1151/-218/-1467 targeting domain (RNA)
cuagaugacaugagguaagu

SEQ ID NO: 672 - RNA, 20 nt, Artificial Sequence
  CEP290-B147/-B1019/-1886 targeting domain (RNA)
uuuuaaggcggggagucaca

SEQ ID NO: 673 - RNA, 20 nt, Artificial Sequence
  CEP290-B73 targeting domain (RNA)
uccuguuucaaaacuuguuc

SEQ ID NO: 674 - RNA, 20 nt, Artificial Sequence
  CEP290-B206 targeting domain (RNA)
uguguugaguaucuccuguu

SEQ ID NO: 675 - RNA, 20 nt, Artificial Sequence
  CEP290-B57/-223 targeting domain (RNA)
cucuugcucuagaugacaug

SEQ ID NO: 676 - RNA, 20 nt, Artificial Sequence
  CEP290-B82/-B1136/-206/-1475 targeting domain (RNA)
caguaaggaggauguaagac

SEQ ID NO: 677 - RNA, 20 nt, Artificial Sequence
  CEP290-B265/-163 targeting domain (RNA)
agaugacaugagguaaguag

SEQ ID NO: 678 - RNA, 20 nt, Artificial Sequence
  CEP290-B105/-B1098/-150/-1805 targeting domain (RNA)
aauucacugagcaaaacaac

SEQ ID NO: 679 - RNA, 20 nt, Artificial Sequence
  CEP290-B239 targeting domain (RNA)
ucacaugggagucacagggu

SEQ ID NO: 680 - RNA, 20 nt, Artificial Sequence
  CEP290-B180/-B1170/-1741 targeting domain (RNA)
uagaugacaugagguaagua

SEQ ID NO: 681 - RNA, 20 nt, Artificial Sequence
  CEP290-B103/-B1204/-669 targeting domain (RNA)
uuuugacaguuuuuaaggcg

SEQ ID NO: 682 - RNA, 20 nt, Artificial Sequence
  CEP290-B254 targeting domain (RNA)
uaauacaugagagugauuag

SEQ ID NO: 683 - RNA, 20 nt, Artificial Sequence
  CEP290-B134 targeting domain (RNA)
uaguucugcaucuuauacau

SEQ ID NO: 684 - RNA, 20 nt, Artificial Sequence
  CEP290-B240/-B1160/-235/-1838 targeting domain (RNA)
cuuuugacaguuuuuaaggc

SEQ ID NO: 685 - RNA, 20 nt, Artificial Sequence
  CEP290-B116/-B1087/-123/-1809 targeting domain (RNA)
aaaagacuuauauuccauua

SEQ ID NO: 686 - RNA, 20 nt, Artificial Sequence
  CEP290-B39/-180 targeting domain (RNA)
auacauaagaaagaacacug

SEQ ID NO: 687 - RNA, 20 nt, Artificial Sequence
  CEP290-B91/-B1096/-145/-1685 targeting domain (RNA)
aauauaagucuuuugauaua

SEQ ID NO: 688 - RNA, 20 nt, Artificial Sequence
  CEP290-B126/-B1188/-1910 targeting domain (RNA)
ugaucauucuuguggcagua

SEQ ID NO: 689 - RNA, 20 nt, Artificial Sequence
  CEP290-B202/-B1164/-691 targeting domain (RNA)
uacauaucugucuuccuuaa

SEQ ID NO: 690 - RNA, 20 nt, Artificial Sequence
  CEP290-B152/-B1157/-228/-1716 targeting domain (RNA)
cuuaagcauacuuuuuuuaa

SEQ ID NO: 691 - RNA, 20 nt, Artificial Sequence
  CEP290-B77/-126 targeting domain (RNA)
aaacaacuggaagagagaaa

SEQ ID NO: 692 - RNA, 20 nt, Artificial Sequence
  CEP290-B145/-273 targeting domain (RNA)
ucauucuuguggcaguaagg

SEQ ID NO: 693 - RNA, 20 nt, Artificial Sequence
  CEP290-B72/-249 targeting domain (RNA)
aaguaugcuuaagaaaaaaa

SEQ ID NO: 694 - RNA, 20 nt, Artificial Sequence
  CEP290-B221/-260 targeting domain (RNA)
auuuuuuauuaucuuuauug

SEQ ID NO: 695 - RNA, 17 nt, Artificial Sequence
  CEP290-B424/-B1269/-219 targeting domain (RNA)
cuaggacuuucuaaugc

SEQ ID NO: 696 - RNA, 17 nt, Artificial Sequence
  CEP290-B425/-B1254/-186 targeting domain (RNA)
aucuaagauccuuucac

SEQ ID NO: 697 - RNA, 17 nt, Artificial Sequence
  CEP290-B426 targeting domain (RNA)
uuaucaccacacuaaau

SEQ ID NO: 698 - RNA, 17 nt, Artificial Sequence
  CEP290-B427/-B495/-167 targeting domain (RNA)
agcucaaaagcuuuugc

SEQ ID NO: 699 - RNA, 17 nt, Artificial Sequence
  CEP290-B428/-B529 targeting domain (RNA)
uguucugaguagcuuuc

SEQ ID NO: 700 - RNA, 17 nt, Artificial Sequence
  CEP290-B429/-157 targeting domain (RNA)
acuuucuaaugcuggag

SEQ ID NO: 701 - RNA, 17 nt, Artificial Sequence
  CEP290-B430/-222 targeting domain (RNA)
cucuauaccuuuuacug

SEQ ID NO: 702 - RNA, 17 nt, Artificial Sequence
  CEP290-B431/-200 targeting domain (RNA)
caagaugucucuugccu

SEQ ID NO: 703 - RNA, 17 nt, Artificial Sequence
  CEP290-B432/-194 targeting domain (RNA)
auuaugccuauuuagug

SEQ ID NO: 704 - RNA, 17 nt, Artificial Sequence
  CEP290-B433/-B513/-B1257/-B1258/-189 targeting domain (RNA)
augacucauaauuuagu

SEQ ID NO: 705 - RNA, 17 nt, Artificial Sequence
  CEP290-B434 targeting domain (RNA)
uagaggcuuauggauuu

SEQ ID NO: 706 - RNA, 17 nt, Artificial Sequence
  CEP290-B435/-B490 targeting domain (RNA)
uauucuacuccugugaa

SEQ ID NO: 707 - RNA, 17 nt, Artificial Sequence
  CEP290-B437/-217 targeting domain (RNA)
cuaaugcuggagaggau

SEQ ID NO: 708 - RNA, 17 nt, Artificial Sequence
  CEP290-B438/-172 targeting domain (RNA)
aggcaagagacaucuug

SEQ ID NO: 709 - RNA, 17 nt, Artificial Sequence
  CEP290-B439/-B1234/-165 targeting domain (RNA)
agccucuauuucugaug

SEQ ID NO: 710 - RNA, 17 nt, Artificial Sequence
  CEP290-B440/-204 targeting domain (RNA)
cagcauuagaaaguccu

SEQ ID NO: 711 - RNA, 17 nt, Artificial Sequence
  CEP290-B441/-B485/-B299/-B531/-225/-1952 targeting domain (RNA)
cugcuuuugccaaagag

SEQ ID NO: 712 - RNA, 17 nt, Artificial Sequence
  CEP290-B442/-B492/-154 targeting domain (RNA)
acauaaucaccucucuu

SEQ ID NO: 713 - RNA, 17 nt, Artificial Sequence
  CEP290-B443 targeting domain (RNA)
ucagaaauagaggcuua

SEQ ID NO: 714 - RNA, 17 nt, Artificial Sequence
  CEP290-B446 targeting domain (RNA)
uuccucaucagaaauag

SEQ ID NO: 715 - RNA, 17 nt, Artificial Sequence
  CEP290-B447/-B1220/-250 targeting domain (RNA)
acagaggacauggagaa

SEQ ID NO: 716 - RNA, 17 nt, Artificial Sequence
  CEP290-B448 targeting domain (RNA)
uggagaggauaggacag

SEQ ID NO: 717 - RNA, 17 nt, Artificial Sequence
  CEP290-B449/-B1235/-169 targeting domain (RNA)
aggaagaugaacaaauc

SEQ ID NO: 718 - RNA, 17 nt, Artificial Sequence
  CEP290-B450/-B1231/-257 targeting domain (RNA)
agaugaaaaauacucuu

SEQ ID NO: 719 - RNA, 20 nt, Artificial Sequence
  CEP290-B455/-171 targeting domain (RNA)
aggacuuucuaaugcuggag

SEQ ID NO: 720 - RNA, 20 nt, Artificial Sequence
  CEP290-B457/-221 targeting domain (RNA)
cuccagcauuagaaaguccu

SEQ ID NO: 721 - RNA, 20 nt, Artificial Sequence
  CEP290-B458/-B506/-B1094/-B1095/-137/-388 targeting domain (RNA)
aacaugacucauaauuuagu

SEQ ID NO: 722 - RNA, 20 nt, Artificial Sequence
  CEP290-B460/-187 targeting domain (RNA)
aucuuccucaucagaaauag

SEQ ID NO: 723 - RNA, 20 nt, Artificial Sequence
  CEP290-B461/-B1114/-178/-1206 targeting domain (RNA)
auaagccucuauuucugaug

SEQ ID NO: 724 - RNA, 20 nt, Artificial Sequence
  CEP290-B462/-B500 targeting domain (RNA)
ucuuauucuacuccugugaa

SEQ ID NO: 725 - RNA, 20 nt, Artificial Sequence
  CEP290-B463/-B521/-B304/-B478/-224/-1951 targeting domain (RNA
cugcugcuuuugccaaagag

SEQ ID NO: 726 - RNA, 20 nt, Artificial Sequence
  CEP290-B464 targeting domain (RNA)
uuucuaaugcuggagaggau

SEQ ID NO: 727 - RNA, 20 nt, Artificial Sequence
  CEP290-134/-B466 targeting domain (RNA)
aaauuaucaccacacuaaau

SEQ ID NO: 728 - RNA, 20 nt, Artificial Sequence
  CEP290-B467/-234 targeting domain (RNA)
cuuguucuguccucaguaaa

SEQ ID NO: 729 - RNA, 20 nt, Artificial Sequence
  CEP290-B468/-125 targeting domain (RNA)
aaaauuaugccuauuuagug

SEQ ID NO: 730 - RNA, 20 nt, Artificial Sequence
  CEP290-B469 targeting domain (RNA)
ucaucagaaauagaggcuua

SEQ ID NO: 731 - RNA, 20 nt, Artificial Sequence
  CEP290-B133/-B470 targeting domain (RNA)
aaauagaggcuuauggauuu

SEQ ID NO: 732 - RNA, 20 nt, Artificial Sequence
  CEP290-B471 targeting domain (RNA)
ugcuggagaggauaggacag

SEQ ID NO: 733 - RNA, 20 nt, Artificial Sequence
  CEP290-B472/-B1120/-191/-1083 targeting domain (RNA)
augaggaagaugaacaaauc

SEQ ID NO: 734 - RNA, 20 nt, Artificial Sequence
  CEP290-B474/-B1158/-232/-459 targeting domain (RNA)
cuuaucuaagauccuuucac

SEQ ID NO: 735 - RNA, 20 nt, Artificial Sequence
  CEP290-B475/-B1104/-162/-840 targeting domain (RNA)
agaggauaggacagaggaca

SEQ ID NO: 736 - RNA, 20 nt, Artificial Sequence
  CEP290-B476/-B1110/-170/-852 targeting domain (RNA)
aggacagaggacauggagaa

SEQ ID NO: 737 - RNA, 20 nt, Artificial Sequence
  CEP290-B477/-B1090/-130/-846 targeting domain (RNA)
aaagaugaaaaauacucuuu

SEQ ID NO: 738-746 - skipped (9 entries)

SEQ ID NO: 747 - RNA, 20 nt, Artificial Sequence
  CEP290-B1009/-1700 targeting domain (RNA)
ccuacuuaccucaugucauc

SEQ ID NO: 748 - RNA, 20 nt, Artificial Sequence
  CEP290-B1010/-B1152/-1093 targeting domain (RNA)
cuaugagccagcaaaagcuu

SEQ ID NO: 749 - RNA, 20 nt, Artificial Sequence
  CEP290-B1011/-B1102/-352 targeting domain (RNA)
acguuguucugaguagcuuu

SEQ ID NO: 750 - RNA, 20 nt, Artificial Sequence
  CEP290-B1012/-B1138/-875 targeting domain (RNA)
cauagagacacauucaguaa

SEQ ID NO: 751 - RNA, 17 nt, Artificial Sequence
  CEP290-B1013 targeting domain (RNA)
acuuaccucaugucauc

SEQ ID NO: 752 - RNA, 17 nt, Artificial Sequence
  CEP290-B1014/-B1297 targeting domain (RNA)
ugagccagcaaaagcuu

SEQ ID NO: 753 - RNA, 17 nt, Artificial Sequence
  CEP290-B1015/-B1317 targeting domain (RNA)
uuguucugaguagcuuu

SEQ ID NO: 754 - RNA, 17 nt, Artificial Sequence
  CEP290-B1016/-B1228 targeting domain (RNA)
agagacacauucaguaa

SEQ ID NO: 755 - RNA, 20 nt, Artificial Sequence
  CEP290-B1018/-626 targeting domain (RNA)
caaaagcuaccgguuaccug

SEQ ID NO: 756 - skipped

SEQ ID NO: 757 - RNA, 20 nt, Artificial Sequence
  CEP290-B1020/-1889 targeting domain (RNA)
ugucaaaagcuaccgguuac

SEQ ID NO: 758 - RNA, 17 nt, Artificial Sequence
  CEP290-B1022 targeting domain (RNA)
aagcuaccgguuaccug

SEQ ID NO: 759 - RNA, 17 nt, Artificial Sequence
  CEP290-B1024 targeting domain (RNA)
caaaagcuaccgguuac

SEQ ID NO: 760 - RNA, 20 nt, Artificial Sequence
  CEP290-B1025/-B1171/-1166 targeting domain (RNA)
uaggaauccugaaagcuacu

SEQ ID NO: 761 - RNA, 20 nt, Artificial Sequence
  CEP290-B1026/-B1132/-452 targeting domain (RNA)
cagaacaacguuuucauuua

SEQ ID NO: 762 - RNA, 20 nt, Artificial Sequence
  CEP290-B1027/-B1126/-877 targeting domain (RNA)
caaaagcuuuugcuggcuca

SEQ ID NO: 763 - RNA, 20 nt, Artificial Sequence
  CEP290-B1028/-B1106/-363 targeting domain (RNA)
agcaaaagcuuuugagcuaa

SEQ ID NO: 764 - RNA, 20 nt, Artificial Sequence
  CEP290-B1118/-365 targeting domain (RNA)
aucuuauucuacuccuguga

SEQ ID NO: 765 - RNA, 17 nt, Artificial Sequence
  CEP290-B1030/-B1209 targeting domain (RNA)
aacaacguuuucauuua

SEQ ID NO: 766 - RNA, 17 nt, Artificial Sequence
  CEP290-B1031/-B1217 targeting domain (RNA)
aagcuuuugcuggcuca

SEQ ID NO: 767 - RNA, 17 nt, Artificial Sequence
  CEP290-B1032/-B1206 targeting domain (RNA)
aaaagcuuuugagcuaa

SEQ ID NO: 768 - RNA, 17 nt, Artificial Sequence
  CEP290-B1033/-B1309 targeting domain (RNA)
uuauucuacuccuguga

SEQ ID NO: 769 - RNA, 20 nt, Artificial Sequence
  CEP290-B1034/-1730 targeting domain (RNA)
gaaacaggaauagaaauuca

SEQ ID NO: 770 - RNA, 20 nt, Artificial Sequence
  CEP290-B1037/-1551 targeting domain (RNA)
gaauauaagucuuuugauau

SEQ ID NO: 771 - RNA, 20 nt, Artificial Sequence
  CEP290-B1038/-1534 targeting domain (RNA)
gagaaaugguucccuauaua

SEQ ID NO: 772 - RNA, 20 nt, Artificial Sequence
  CEP290-B1039/-1295 targeting domain (RNA)
gagaggauaggacagaggac

SEQ ID NO: 773 - RNA, 20 nt, Artificial Sequence
  CEP290-B1040/-1292 targeting domain (RNA)
gaugaggaagaugaacaaau

SEQ ID NO: 774 - RNA, 20 nt, Artificial Sequence
  CEP290-B1042/-937 targeting domain (RNA)
gauuuguucaucuuccucau

SEQ ID NO: 775 - RNA, 20 nt, Artificial Sequence
  CEP290-B1043/-1875 targeting domain (RNA)
gcaguaaggaggauguaaga

SEQ ID NO: 776 - RNA, 20 nt, Artificial Sequence
  CEP290-B1046/-B1047/-950 targeting domain (RNA)
gcuuucugcugcuuuugcca

SEQ ID NO: 777 - skipped

SEQ ID NO: 778 - RNA, 20 nt, Artificial Sequence
  CEP290-B1049/-959 targeting domain (RNA)
ggaaagaugaaaaauacucu

SEQ ID NO: 779 - RNA, 20 nt, Artificial Sequence
  CEP290-B1050/-1544 targeting domain (RNA)
ggaggauguaagacuggaga

SEQ ID NO: 780 - RNA, 20 nt, Artificial Sequence
  CEP290-B1052/-B1053/-940 targeting domain (RNA)
ggugauuauguuacuuuuua

SEQ ID NO: 781 - skipped

SEQ ID NO: 782 - RNA, 20 nt, Artificial Sequence
  CEP290-B1056/-1506 targeting domain (RNA)
guggugucaaauauggugcu

SEQ ID NO: 783 - RNA, 17 nt, Artificial Sequence
  CEP290-B1057 targeting domain (RNA)
gaaaaaaaagguaaugc

SEQ ID NO: 784 - RNA, 17 nt, Artificial Sequence
  CEP290-B1058 targeting domain (RNA)
gaaaagagcacguacaa

SEQ ID NO: 785 - RNA, 17 nt, Artificial Sequence
  CEP290-B1060 targeting domain (RNA)
gaaugaucauucuaaac

SEQ ID NO: 786 - RNA, 17 nt, Artificial Sequence
  CEP290-B1061 targeting domain (RNA)
gacagaggacauggaga

SEQ ID NO: 787 - RNA, 17 nt, Artificial Sequence
  CEP290-B1062 targeting domain (RNA)
gacuuucuaaugcugga

SEQ ID NO: 788 - RNA, 17 nt, Artificial Sequence
  CEP290-B1063 targeting domain (RNA)
gagagugauuaguggug

SEQ ID NO: 789 - RNA, 17 nt, Artificial Sequence
  CEP290-B1064 targeting domain (RNA)
gagcaaaacaacuggaa

SEQ ID NO: 790 - RNA, 17 nt, Artificial Sequence
  CEP290-B1065 targeting domain (RNA)
gaggaagaugaacaaau

SEQ ID NO: 791 - RNA, 17 nt, Artificial Sequence
  CEP290-B1066 targeting domain (RNA)
gagucacaugggaguca

SEQ ID NO: 792 - RNA, 17 nt, Artificial Sequence
  CEP290-B1067/-B1068 targeting domain (RNA)
gaucuuauucuacuccu

SEQ ID NO: 793 - RNA, 17 nt, Artificial Sequence
  CEP290-B1071/-B1072 targeting domain (RNA)
gauuauguuacuuuuua

SEQ ID NO: 794 - RNA, 17 nt, Artificial Sequence
  CEP290-B1073 targeting domain (RNA)
gcaaaacaacuggaaga

SEQ ID NO: 795 - RNA, 17 nt, Artificial Sequence
  CEP290-B1077 targeting domain (RNA)
ggauguaagacuggaga

SEQ ID NO: 796 - RNA, 17 nt, Artificial Sequence
  CEP290-B1078 targeting domain (RNA)
guaaggaggauguaaga

SEQ ID NO: 797 - RNA, 17 nt, Artificial Sequence
  CEP290-B1079 targeting domain (RNA)
guaucuccuguuuggca

SEQ ID NO: 798 - RNA, 17 nt, Artificial Sequence
  CEP290-B1080 targeting domain (RNA)
gucaucuagagcaagag

SEQ ID NO: 799 - RNA, 17 nt, Artificial Sequence
  CEP290-B1081 targeting domain (RNA)
guccucaguaaaaggua

SEQ ID NO: 800 - RNA, 17 nt, Artificial Sequence
  CEP290-B1082 targeting domain (RNA)
gugaaaggaucuuagau

SEQ ID NO: 801 - RNA, 17 nt, Artificial Sequence
  CEP290-B1083 targeting domain (RNA)
gugcucuuuucuauaua

SEQ ID NO: 802 - RNA, 17 nt, Artificial Sequence
  CEP290-B1084 targeting domain (RNA)
gugucaaauauggugcu

SEQ ID NO: 803 - RNA, 17 nt, Artificial Sequence
  CEP290-B1085 targeting domain (RNA)
guucccuauauauagaa

SEQ ID NO: 804 - skipped

SEQ ID NO: 805 - RNA, 20 nt, Artificial Sequence
  CEP290-B1088/-B1089/-829 targeting domain (RNA)
aaacaugacucauaauuuag

SEQ ID NO: 806-807 - skipped (2 entries)

SEQ ID NO: 808 - RNA, 20 nt, Artificial Sequence
  CEP290-B1091/-1440 targeting domain (RNA)
aaauucacugagcaaaacaa

SEQ ID NO: 809 - RNA, 20 nt, Artificial Sequence
  CEP290-B1092/-1383 targeting domain (RNA)
aacaaguuuugaaacaggaa

SEQ ID NO: 810 - RNA, 20 nt, Artificial Sequence
  CEP290-B1093/-1372 targeting domain (RNA)
aacaggagauacucaacaca

SEQ ID NO: 811-813 - skipped (3 entries)

SEQ ID NO: 814 - RNA, 20 nt, Artificial Sequence
  CEP290-B1097/-1663 targeting domain (RNA)
aaucacucucauguauuagc

SEQ ID NO: 815 - skipped

SEQ ID NO: 816 - RNA, 20 nt, Artificial Sequence
  CEP290-B1099/-1688 targeting domain (RNA)
acaaaagaacauacauaaga

SEQ ID NO: 817 - RNA, 20 nt, Artificial Sequence
  CEP290-B1100/-1375 targeting domain (RNA)
acguacaaaagaacauacau

SEQ ID NO: 818 - skipped

SEQ ID NO: 819 - RNA, 20 nt, Artificial Sequence
  CEP290-B1103/-1388 targeting domain (RNA)
acugagcaaaacaacuggaa

SEQ ID NO: 820 - skipped

SEQ ID NO: 821 - RNA, 20 nt, Artificial Sequence
  CEP290-B1105/-1787 targeting domain (RNA)
agaugcagaacuaguguaga

SEQ ID NO: 822 - skipped

SEQ ID NO: 823 - RNA, 20 nt, Artificial Sequence
  CEP290-B1107/-790 targeting domain (RNA)
agcauuagaaaguccuaggc

SEQ ID NO: 824 - RNA, 20 nt, Artificial Sequence
  CEP290-B1108/-1782 targeting domain (RNA)
agcuugaacucugugccaaa

SEQ ID NO: 825 - RNA, 20 nt, Artificial Sequence
  CEP290-B1109/-1801 targeting domain (RNA)
agcuuuugacaguuuuuaag

SEQ ID NO: 826 - skipped

SEQ ID NO: 827 - RNA, 20 nt, Artificial Sequence
  CEP290-B1111/-410 targeting domain (RNA)
aggauaggacagaggacaug

SEQ ID NO: 828 - RNA, 20 nt, Artificial Sequence
  CEP290-B1112/-1393 targeting domain (RNA)
agguaaugccugaacaaguu

SEQ ID NO: 829 - RNA, 20 nt, Artificial Sequence
  CEP290-B1113/-1406 targeting domain (RNA)
auaagaaagaacacuguggu

SEQ ID NO: 830 - skipped

SEQ ID NO: 831 - RNA, 20 nt, Artificial Sequence
  CEP290-B1115/-1779 targeting domain (RNA)
auacaugagagugauuagug

SEQ ID NO: 832 - RNA, 20 nt, Artificial Sequence
  CEP290-B1116/-1678 targeting domain (RNA)
auagaaaagagcacguacaa

SEQ ID NO: 833 - RNA, 20 nt, Artificial Sequence
  CEP290-B1117/-601 targeting domain (RNA)
aucauucuuguggcaguaag

SEQ ID NO: 834 - skipped

SEQ ID NO: 835 - RNA, 20 nt, Artificial Sequence
  CEP290-B1119/-358 targeting domain (RNA)
aucuuguggauaauguauca

SEQ ID NO: 836 - skipped

SEQ ID NO: 837 - RNA, 20 nt, Artificial Sequence
  CEP290-B1121/-1798 targeting domain (RNA)
augaucauucuuguggcagu

SEQ ID NO: 838 - RNA, 20 nt, Artificial Sequence
  CEP290-B1122/-1075 targeting domain (RNA)
augcuggagaggauaggaca

SEQ ID NO: 839 - RNA, 20 nt, Artificial Sequence
  CEP290-B1123/-1683 targeting domain (RNA)
augguucccuauauauagaa

SEQ ID NO: 840 - RNA, 20 nt, Artificial Sequence
  CEP290-B1124/-624 targeting domain (RNA)
auuuaauuuguuucugugug

SEQ ID NO: 841 - RNA, 20 nt, Artificial Sequence
  CEP290-B1125/-1712 targeting domain (RNA)
caaaaccuauguauaagaug

SEQ ID NO: 842 - RNA, 20 nt, Artificial Sequence
  CEP290-B1126/-1495 targeting domain (RNA)
caaaagacuuauauuccauu

SEQ ID NO: 843 - skipped

SEQ ID NO: 844 - RNA, 20 nt, Artificial Sequence
  CEP290-B1128/-637 targeting domain (RNA)
caagaaugaucauucuaaac

SEQ ID NO: 845 - RNA, 20 nt, Artificial Sequence
  CEP290-B1129/-1461 targeting domain (RNA)
cacagaguucaagcuaauac

SEQ ID NO: 846 - RNA, 20 nt, Artificial Sequence
  CEP290-B1130/-629 targeting domain (RNA)
cacaggguaggauucauguu

SEQ ID NO: 847 - skipped

SEQ ID NO: 848 - RNA, 20 nt, Artificial Sequence
  CEP290-B1133/-632 targeting domain (RNA)
cagaguucaagcuaauacau

SEQ ID NO: 849 - RNA, 20 nt, Artificial Sequence
  CEP290-B1134/-B1135/-457 targeting domain (RNA)
caguaaaugaaaacguuguu

SEQ ID NO: 850 - skipped

SEQ ID NO: 851 - RNA, 20 nt, Artificial Sequence
  CEP290-B1137/-879 targeting domain (RNA)
cauaagccucuauuucugau

SEQ ID NO: 852 - skipped

SEQ ID NO: 853 - RNA, 20 nt, Artificial Sequence
  CEP290-B1139/-1829 targeting domain (RNA)
caucucuugcucuagaugac

SEQ ID NO: 854 - RNA, 20 nt, Artificial Sequence
  CEP290-B1140/-1710 targeting domain (RNA)
caugagagugauuaguggug

SEQ ID NO: 855 - RNA, 20 nt, Artificial Sequence
  CEP290-B1141/-1709 targeting domain (RNA)
caugucaucuagagcaagag

SEQ ID NO: 856 - RNA, 20 nt, Artificial Sequence
  CEP290-B1142/-B1143/-1117 targeting domain (RNA)
cauuuacugaaugugucucu

SEQ ID NO: 857 - RNA, 20 nt, Artificial Sequence
  CEP290-B1144/-1493 targeting domain (RNA)
ccauuaaaaaaaguaugcuu

SEQ ID NO: 858 - RNA, 20 nt, Artificial Sequence
  CEP290-B1145/-1232 targeting domain (RNA)
ccuaggacuuucuaaugcug

SEQ ID NO: 859 - RNA, 20 nt, Artificial Sequence
  CEP290-B1146/-B1147/-888 targeting domain (RNA)
ccucucuuuggcaaaagcag

SEQ ID NO: 860 - RNA, 20 nt, Artificial Sequence
  CEP290-B1148/-424 targeting domain (RNA)
ccugugaaaggaucuuagau

SEQ ID NO: 861 - RNA, 20 nt, Artificial Sequence
  CEP290-B1150/-443 targeting domain (RNA)
cuaagauccuuucacaggag

SEQ ID NO: 862-863 - skipped (2 entries)

SEQ ID NO: 864 - RNA, 20 nt, Artificial Sequence
  CEP290-B1153/-B1154/-885 targeting domain (RNA)
cucauaauuuaguaggaauc

SEQ ID NO: 865 - RNA, 20 nt, Artificial Sequence
  CEP290-B1155/-446 targeting domain (RNA)
cucaucagaaauagaggcuu

SEQ ID NO: 866 - RNA, 20 nt, Artificial Sequence
  CEP290-B1156/-1114 targeting domain (RNA)
cucuauuucugaugaggaag

SEQ ID NO: 867-868 - skipped (2 entries)

SEQ ID NO: 869 - RNA, 20 nt, Artificial Sequence
  CEP290-B1159/-1108 targeting domain (RNA)
cuuucuaaugcuggagagga

SEQ ID NO: 870 - skipped

SEQ ID NO: 871 - RNA, 20 nt, Artificial Sequence
  CEP290-B1161/-52/-1645 targeting domain (RNA)
uaaaacuaagacacugccaa

SEQ ID NO: 872 - RNA, 20 nt, Artificial Sequence
  CEP290-B1162/-1760 targeting domain (RNA)
uaagaaaaaaaagguaaugc

SEQ ID NO: 873 - RNA, 20 nt, Artificial Sequence
  CEP290-B1163/-1318 targeting domain (RNA)
uaaugcuggagaggauagga

SEQ ID NO: 874 - skipped

SEQ ID NO: 875 - RNA, 20 nt, Artificial Sequence
  CEP290-B1165/-661 targeting domain (RNA)
uacauccuccuuacugccac

SEQ ID NO: 876 - RNA, 20 nt, Artificial Sequence
  CEP290-B1167/-1567 targeting domain (RNA)
uaccucaugucaucuagagc

SEQ ID NO: 877 - RNA, 20 nt, Artificial Sequence
  CEP290-B1168/-1604 targeting domain (RNA)
uacgugcucuuuucuauaua

SEQ ID NO: 878 - RNA, 20 nt, Artificial Sequence
  CEP290-B1169/-675 targeting domain (RNA)
uagagcaagagaugaacuag

SEQ ID NO: 879-880 - skipped (2 entries)

SEQ ID NO: 881 - RNA, 20 nt, Artificial Sequence
  CEP290-B1172/-1040 targeting domain (RNA)
uaggacagaggacauggaga

SEQ ID NO: 882 - RNA, 20 nt, Artificial Sequence
  CEP290-B1173/-473 targeting domain (RNA)
uaggacuuucuaaugcugga

SEQ ID NO: 883 - RNA, 20 nt, Artificial Sequence
  CEP290-B1174/-1594 targeting domain (RNA)
ucacugagcaaaacaacugg

SEQ ID NO: 884 - RNA, 20 nt, Artificial Sequence
  CEP290-B1175/-B1176/-1333 targeting domain (RNA)
ucauguuuaucaauauuauu

SEQ ID NO: 885 - RNA, 20 nt, Artificial Sequence
  CEP290-B1177/-1149 targeting domain (RNA)
uccacaagaugucucuugcc

SEQ ID NO: 886 - RNA, 20 nt, Artificial Sequence
  CEP290-B1178/-1319 targeting domain (RNA)
uccauaagccucuauuucug

SEQ ID NO: 887 - RNA, 20 nt, Artificial Sequence
  CEP290-B1179/-523 targeting domain (RNA)
uccuaggcaagagacaucuu

SEQ ID NO: 888 - RNA, 20 nt, Artificial Sequence
  CEP290-B1180/-1902 targeting domain (RNA)
ucuagaugacaugagguaag

SEQ ID NO: 889 - RNA, 20 nt, Artificial Sequence
  CEP290-B1181/-1160 targeting domain (RNA)
ucuauaccuuuuacugagga

SEQ ID NO: 890 - RNA, 20 nt, Artificial Sequence
  CEP290-B1182/-540 targeting domain (RNA)
ucuguccucaguaaaaggua

SEQ ID NO: 891 - RNA, 20 nt, Artificial Sequence
  CEP290-B1183/-1650 targeting domain (RNA)
ucuuaagcauacuuuuuuua

SEQ ID NO: 892 - RNA, 20 nt, Artificial Sequence
  CEP290-B1184/-1341 targeting domain (RNA)
ucuuaucuaagauccuuuca

SEQ ID NO: 893 - RNA, 20 nt, Artificial Sequence
  CEP290-B1185/-685 targeting domain (RNA)
ucuuccaguuguuuugcuca

SEQ ID NO: 894 - RNA, 20 nt, Artificial Sequence
  CEP290-B1186/-1618 targeting domain (RNA)
ugagcaaaacaacuggaaga

SEQ ID NO: 895 - RNA, 20 nt, Artificial Sequence
  CEP290-B1187/-667 targeting domain (RNA)
ugaguaucuccuguuuggca

SEQ ID NO: 896 - skipped

SEQ ID NO: 897 - RNA, 20 nt, Artificial Sequence
  CEP290-B1190/-1597 targeting domain (RNA)
ugccugaacaaguuuugaaa

SEQ ID NO: 898 - RNA, 20 nt, Artificial Sequence
  CEP290-B1192/-1640 targeting domain (RNA)
uguaagacuggagauagaga

SEQ ID NO: 899 - RNA, 20 nt, Artificial Sequence
  CEP290-B1193/-1014 targeting domain (RNA)
uguccuauccucuccagcau

SEQ ID NO: 900 - RNA, 20 nt, Artificial Sequence
  CEP290-B1194/-550 targeting domain (RNA)
uuaacguuaucauuuuccca

SEQ ID NO: 901 - RNA, 20 nt, Artificial Sequence
  CEP290-B1195/-1627 targeting domain (RNA)
uuacauaucugucuuccuua

SEQ ID NO: 902 - RNA, 20 nt, Artificial Sequence
  CEP290-B1196/-B1197/-1002 targeting domain (RNA)
uuagaucuuauucuacuccu

SEQ ID NO: 903 - skipped

SEQ ID NO: 904 - RNA, 20 nt, Artificial Sequence
  CEP290-B1198/-B1199/-535 targeting domain (RNA)
uucaggauuccuacuaaauu

SEQ ID NO: 905 - RNA, 20 nt, Artificial Sequence
  CEP290B1200/-1351 targeting domain (RNA)
uucaucuuccucaucagaaa

SEQ ID NO: 906 - RNA, 20 nt, Artificial Sequence
  CEP290-B1201/-1310 targeting domain (RNA)
uugccuaggacuuucuaaug

SEQ ID NO: 907 - RNA, 20 nt, Artificial Sequence
  CEP290-B1202/-B1203/-1322 targeting domain (RNA)
uuucugcugcuuuugccaaa

SEQ ID NO: 908 - skipped

SEQ ID NO: 909 - RNA, 20 nt, Artificial Sequence
  CEP290-B1205/-1568 targeting domain (RNA)
uuuuuaaggcggggagucac

SEQ ID NO: 910 - skipped

SEQ ID NO: 911 - RNA, 17 nt, Artificial Sequence
  CEP290-B1207 targeting domain (RNA)
aaagaacauacauaaga

SEQ ID NO: 912 - RNA, 17 nt, Artificial Sequence
  CEP290-B1208 targeting domain (RNA)
aaaugguucccuauaua

SEQ ID NO: 913 - skipped

SEQ ID NO: 914 - RNA, 17 nt, Artificial Sequence
  CEP290-B1210 targeting domain (RNA)
aaccuauguauaagaug

SEQ ID NO: 915 - RNA, 17 nt, Artificial Sequence
  CEP290-B1211 targeting domain (RNA)
aacuaagacacugccaa

SEQ ID NO: 916 - RNA, 17 nt, Artificial Sequence
  CEP290-B1212 targeting domain (RNA)
aagacuggagauagaga

SEQ ID NO: 917 - RNA, 17 nt, Artificial Sequence
  CEP290-B1213 targeting domain (RNA)
aagacuuauauuccauu

SEQ ID NO: 918 - RNA, 17 nt, Artificial Sequence
  CEP290-B1214 targeting domain (RNA)
aagaugaaaaauacucu

SEQ ID NO: 919 - skipped

SEQ ID NO: 920 - RNA, 17 nt, Artificial Sequence
  CEP290-B1216 targeting domain (RNA)
aagccucuauuucugau

SEQ ID NO: 921 - skipped

SEQ ID NO: 922 - RNA, 17 nt, Artificial Sequence
  CEP290-1218 targeting domain (RNA)
aaguuuugaaacaggaa

SEQ ID NO: 923 - RNA, 17 nt, Artificial Sequence
  CEP290-B1219 targeting domain (RNA)
acaagaugucucuugcc

SEQ ID NO: 924 - skipped

SEQ ID NO: 925 - RNA, 17 nt, Artificial Sequence
  CEP290-B1221 targeting domain (RNA)
acaggaauagaaauuca

SEQ ID NO: 926 - RNA, 17 nt, Artificial Sequence
  CEP290-B1222 targeting domain (RNA)
acaugggagucacaggg

SEQ ID NO: 927 - RNA, 17 nt, Artificial Sequence
  CEP290-B1223 targeting domain (RNA)
acguuaucauuuuccca

SEQ ID NO: 928 - RNA, 17 nt, Artificial Sequence
  CEP290-B1225 targeting domain (RNA)
agaaagaacacuguggu

SEQ ID NO: 929-930 - skipped (2 entries)

SEQ ID NO: 931 - RNA, 17 nt, Artificial Sequence
  CEP290-B1229 targeting domain (RNA)
agaguucaagcuaauac

SEQ ID NO: 932 - RNA, 17 nt, Artificial Sequence
  CEP290-B1230 targeting domain (RNA)
agauccuuucacaggag

SEQ ID NO: 933 - skipped

SEQ ID NO: 934 - RNA, 17 nt, Artificial Sequence
  CEP290-B1232 targeting domain (RNA)
agaugacaugagguaag

SEQ ID NO: 935 - RNA, 17 nt, Artificial Sequence
  CE290-B1233 targeting domain (RNA)
agcaagagaugaacuag

SEQ ID NO: 936-937 - skipped (2 entries)

SEQ ID NO: 938 - RNA, 17 nt, Artificial Sequence
  CEP290-B1236 targeting domain (RNA)
aggacuuucuaaugcug

SEQ ID NO: 939 - RNA, 17 nt, Artificial Sequence
  CEP290-B1237 targeting domain (RNA)
aggagauacucaacaca

SEQ ID NO: 940 - RNA, 17 nt, Artificial Sequence
  CEP290-B1238 targeting domain (RNA)
aggauaggacagaggac

SEQ ID NO: 941 - RNA, 17 nt, Artificial Sequence
  CEP290-B1239/-B1240 targeting domain (RNA)
aggauuccuacuaaauu

SEQ ID NO: 942 - RNA, 17 nt, Artificial Sequence
  CEP290-B1241 targeting domain (RNA)
aggguaggauucauguu

SEQ ID NO: 943 - RNA, 17 nt, Artificial Sequence
  CEP290-B1242 targeting domain (RNA)
aguucaagcuaauacau

SEQ ID NO: 944 - RNA, 17 nt, Artificial Sequence
  CEP290-B1243 targeting domain (RNA)
auaagccucuauuucug

SEQ ID NO: 945 - skipped

SEQ ID NO: 946 - RNA, 17 nt, Artificial Sequence
  CEP290-B1245/-B1246 targeting domain (RNA)
auaauuuaguaggaauc

SEQ ID NO: 947 - RNA, 17 nt, Artificial Sequence
  CEP290-B1247 targeting domain (RNA)
auaccuuuuacugagga

SEQ ID NO: 948 - RNA, 17 nt, Artificial Sequence
  CEP290-B1248 targeting domain (RNA)
auagaggcuuauggauu

SEQ ID NO: 949 - RNA, 17 nt, Artificial Sequence
  CEP290-B1249 targeting domain (RNA)
auaggacagaggacaug

SEQ ID NO: 950 - skipped

SEQ ID NO: 951 - RNA, 17 nt, Artificial Sequence
  CEP290-B1251 targeting domain (RNA)
aucagaaauagaggcuu

SEQ ID NO: 952 - RNA, 17 nt, Artificial Sequence
  CEP290-B1252 targeting domain (RNA)
aucauucuuguggcagu

SEQ ID NO: 953 - RNA, 17 nt, Artificial Sequence
  CEP290-B1253 targeting domain (RNA)
auccuccuuacugccac

SEQ ID NO: 954 - skipped

SEQ ID NO: 955 - RNA, 17 nt, Artificial Sequence
  CEP290-B1255 targeting domain (RNA)
aucuuccucaucagaaa

SEQ ID NO: 956 - skipped

SEQ ID NO: 957 - RNA, 17 nt, Artificial Sequence
  CEP290-B1260 targeting domain (RNA)
auuagaaaguccuaggc

SEQ ID NO: 958 - RNA, 17 nt, Artificial Sequence
  CEP290-B1261 targeting domain (RNA)
auucuuguggcaguaag

SEQ ID NO: 959 - RNA, 17 nt, Artificial Sequence
  CEP290-B1262 targeting domain (RNA)
cacucucauguauuagc

SEQ ID NO: 960 - RNA, 17 nt, Artificial Sequence
  CEP290-B1263 targeting domain (RNA)
cauaucugucuuccuua

SEQ ID NO: 961 - RNA, 17 nt, Artificial Sequence
  CEP290-B1264/-B1265 targeting domain
caugacucauaauuuag

SEQ ID NO: 962 - RNA, 17 nt, Artificial Sequence
  CEP290-B1266 targeting domain
caugagagugauuagug

SEQ ID NO: 963 - RNA, 17 nt, Artificial Sequence
  CEP290-B1267 targeting domain
ccuaggacuuucuaaug

SEQ ID NO: 964 - RNA, 17 nt, Artificial Sequence
  CEP290-B1268 trgeting domain
ccuauccucuccagcau

SEQ ID NO: 965 - skipped

SEQ ID NO: 966 - RNA, 17 nt, Artificial Sequence
  CEP290-B1270 targeting domain
cucaugucaucuagagc

SEQ ID NO: 967 - RNA, 17 nt, Artificial Sequence
  CEP290-B1271 targeting domain
cucuugcucuagaugac

SEQ ID NO: 968 - RNA, 17 nt, Artificial Sequence
  CEP290-B1272/-B1273 targeting domain (RNA)
cucuuuggcaaaagcag

SEQ ID NO: 969 - skipped

SEQ ID NO: 970 - RNA, 17 nt, Artificial Sequence
  CEP290-B1274 targeting domain (RNA)
cugaacaaguuuugaaa

SEQ ID NO: 971 - RNA, 17 nt, Artificial Sequence
  CEP290-B1275 targeting domain (RNA)
cugagcaaaacaacugg

SEQ ID NO: 972 - RNA, 17 nt, Artificial Sequence
  CEP290-B1276/-B1277 targeting domain (RNA)
cugcugcuuuugccaaa

SEQ ID NO: 973 - RNA, 17 nt, Artificial Sequence
  CEP290-B1278 targeting domain
cuggagaggauaggaca

SEQ ID NO: 974 - RNA, 17 nt, Artificial Sequence
  CEP290-B1279/-B1280 targeting domain (RNA)
uaaaugaaaacguuguu

SEQ ID NO: 975 - RNA, 17 nt, Artificial Sequence
  CEP290-B1281 targeting domain (RNA)
uaagcauacuuuuuuua

SEQ ID NO: 976 - RNA, 17 nt, Artificial Sequence
  CEP290-B1283 targeting domain (RNA)
uaaugccugaacaaguu

SEQ ID NO: 977 - RNA, 17 nt, Artificial Sequence
  CEP290-B1284 targeting domain (RNA)
uaauuuguuucugugug

SEQ ID NO: 978 - RNA, 17 nt, Artificial Sequence
  CEP290-B1285 targeting domain (RNA)
uacaaaagaacauacau

SEQ ID NO: 979 - RNA, 17 nt, Artificial Sequence
  CEP290-B1286 targeting domain (RNA)
uaggcaagagacaucuu

SEQ ID NO: 980 - RNA, 17 nt, Artificial Sequence
  CEP290-B1287 targeting domain (RNA)
uauaagucuuuugauau

SEQ ID NO: 981 - RNA, 17 nt, Artificial Sequence
  CEP290-B1288 targeting domain (RNA)
uaucuaagauccuuuca

SEQ ID NO: 982 - RNA, 17 nt, Artificial Sequence
  CEP290-B1289 targeting domain (RNA)
uauuucugaugaggaag

SEQ ID NO: 983 - RNA, 17 nt, Artificial Sequence
  CEP290-B1292 targeting domain (RNA)
uccaguuguuuugcuca

SEQ ID NO: 984 - RNA, 17 nt, Artificial Sequence
  CEP290-B1293 targeting domain (RNA)
ucuaaugcuggagagga

SEQ ID NO: 985-986 - skipped (2 entries)

SEQ ID NO: 987 - RNA, 17 nt, Artificial Sequence
  CEP290-B1298 targeting domain (RNA)
ugcagaacuaguguaga

SEQ ID NO: 988 - skipped

SEQ ID NO: 989 - RNA, 17 nt, Artificial Sequence
  CEP290-B1301 targeting domain (RNA)
ugcuggagaggauagga

SEQ ID NO: 990 - RNA, 17 nt, Artificial Sequence
  CEP290-B1303/-B1304 targeting domain (RNA)
uguuuaucaauauuauu

SEQ ID NO: 991 - RNA, 17 nt, Artificial Sequence
  CEP290-B1305 targeting domain (RNA)
uuaaaaaaaguaugcuu

SEQ ID NO: 992 - RNA, 17 nt, Artificial Sequence
  CEP290-B1306 targeting domain (RNA)
uuaaggcggggagucac

SEQ ID NO: 993 - RNA, 17 nt, Artificial Sequence
  CEP290-B1307/-B1308 targeting domain (RNA)
uuacugaaugugucucu

SEQ ID NO: 994 - skipped

SEQ ID NO: 995 - RNA, 17 nt, Artificial Sequence
  CEP290-B1310 targeting domain (RNA)
uucacugagcaaaacaa

SEQ ID NO: 996 - RNA, 17 nt, Artificial Sequence
  CEP290-B1311/-B1312 targeting domain (RNA)
uucugcugcuuuugcca

SEQ ID NO: 997 - RNA, 17 nt, Artificial Sequence
  CEP290-B1313 targeting domain (RNA)
uugaacucugugccaaa

SEQ ID NO: 998 - skipped

SEQ ID NO: 999 - RNA, 17 nt, Artificial Sequence
  CEP290-B1315 targeting domain (RNA)
uuguggauaauguauca

SEQ ID NO: 1000 - RNA, 17 nt, Artificial Sequence
  CEP290-B1316 targeting domain (RNA)
uuguucaucuuccucau

SEQ ID NO: 1001-1002 - skipped (2 entries)

SEQ ID NO: 1003 - RNA, 17 nt, Artificial Sequence
  CEP290-B1319 targeting domain (RNA)
uuuugacaguuuuuaag

SEQ ID NO: 1004 - RNA, 17 nt, Artificial Sequence
  CEP290-B235/-1967 targeting domain (RNA)
uucaagcuaauacauga

SEQ ID NO: 1005 - RNA, 17 nt, Artificial Sequence
  CEP290-B109/-1963 targeting domain (RNA)
cacaugggagucacagg

SEQ ID NO: 1006 - RNA, 20 nt, Artificial Sequence
  CEP290-B129/-1960 targeting domain (RNA)
agucacaugggagucacagg

SEQ ID NO: 1007 - RNA, 17 nt, Artificial Sequence
  CEP290-B295/-1939 targeting domain (RNA)
aauagaggcuuauggau

SEQ ID NO: 1008 - RNA, 17 nt, Artificial Sequence
  CEP290-B297/-1950 targeting domain (RNA)
cugaggacagaacaagc

SEQ ID NO: 1009 - RNA, 17 nt, Artificial Sequence
  CEP290-B298/-1948 targeting domain (RNA)
caucagaaauagaggcu

SEQ ID NO: 1010 - skipped

SEQ ID NO: 1011 - RNA, 17 nt, Artificial Sequence
  CEP290-B300/-B522/-1942 targeting domain (RNA)
agcagaaagcaaacuga

SEQ ID NO: 1012 - RNA, 17 nt, Artificial Sequence
  CEP290-B301/-B537/-1937 targeting domain (RNA)
aaaagcagcagaaagca

SEQ ID NO: 1013 - RNA, 20 nt, Artificial Sequence
  CEP290-B302/-1956 targeting domain (RNA)
uuacugaggacagaacaagc

SEQ ID NO: 1014 - RNA, 20 nt, Artificial Sequence
  CEP290-B303/-B504/-1938 targeting domain (RNA)
aacguuguucugaguagcuu

SEQ ID NO: 1015 - skipped

SEQ ID NO: 1016 - RNA, 20 nt, Artificial Sequence
  CEP290-B305/-1941 targeting domain (RNA)
agaaauagaggcuuauggau

SEQ ID NO: 1017 - RNA, 20 nt, Artificial Sequence
  CEP290-B306/-1949 targeting domain (RNA)
ccucaucagaaauagaggcu

SEQ ID NO: 1018 - RNA, 20 nt, Artificial Sequence
  CEP290-B307/-B526/-1943 targeting domain (RNA)
agcagcagaaagcaaacuga

SEQ ID NO: 1019-1024 - skipped (6 entries)

SEQ ID NO: 1025 - RNA, 24 nt, Artificial Sequence
  CEP290-35/-616 targeting domain (RNA)
aaauaaaacuaagacacugccaau

SEQ ID NO: 1026 - RNA, 23 nt, Artificial Sequence
  CEP290-36/-617 targeting domain (RNA)
aauaaaacuaagacacugccaau

SEQ ID NO: 1027 - RNA, 22 nt, Artificial Sequence
  CEP290-37/-618 targeting domain (RNA)
auaaaacuaagacacugccaau

SEQ ID NO: 1028 - RNA, 19 nt, Artificial Sequence
  CEP290-39/-620 targeting domain (RNA)
aaacuaagacacugccaau

SEQ ID NO: 1029 - RNA, 18 nt, Artificial Sequence
  CEP290-40/-621 targeting domain (RNA)
aacuaagacacugccaau

SEQ ID NO: 1030 - RNA, 24 nt, Artificial Sequence
  CEP290-17 targeting domain (RNA)
ccgcaccuggccccaguuguaauu

SEQ ID NO: 1031 - RNA, 23 nt, Artificial Sequence
  CEP290-41 targeting domain (RNA)
cgcaccuggccccaguuguaauu

SEQ ID NO: 1032 - RNA, 21 nt, Artificial Sequence
  CEP290-42 targeting domain (RNA)
caccuggccccaguuguaauu

SEQ ID NO: 1033 - RNA, 19 nt, Artificial Sequence
  CEP290-513 targeting domain (RNA)
ccuggccccaguuguaauu

SEQ ID NO: 1034 - RNA, 18 nt, Artificial Sequence
  CEP290-514 targeting domain (RNA)
cuggccccaguuguaauu

SEQ ID NO: 1035 - RNA, 21 nt, Artificial Sequence
  CEP290-43/-693 targeting domain (RNA)
uaaaacuaagacacugccaau

SEQ ID NO: 1036 - RNA, 24 nt, Artificial Sequence
  CEP290-44/-1448 targeting domain (RNA)
aaaauaaaacuaagacacugccaa

SEQ ID NO: 1037 - RNA, 23 nt, Artificial Sequence
  CEP290-45/-1449 targeting domain (RNA)
aaauaaaacuaagacacugccaa

SEQ ID NO: 1038 - RNA, 22 nt, Artificial Sequence
  CEP290-46/-1450 targeting domain (RNA)
aauaaaacuaagacacugccaa

SEQ ID NO: 1039 - RNA, 21 nt, Artificial Sequence
  CEP290-47/-1451 targeting domain (RNA)
auaaaacuaagacacugccaa

SEQ ID NO: 1040 - RNA, 19 nt, Artificial Sequence
  CEP290-48/-1452 targeting domain (RNA)
aaaacuaagacacugccaa

SEQ ID NO: 1041 - RNA, 18 nt, Artificial Sequence
  CEP290-49/-1453 targeting domain (RNA)
aaacuaagacacugccaa

SEQ ID NO: 1042 - RNA, 24 nt, Artificial Sequence
  CEP290-16 targeting domain (RNA)
aagacacugccaauagggauaggu

SEQ ID NO: 1043 - RNA, 23 nt, Artificial Sequence
  CEP290-50/-1366 targeting domain (RNA)
agacacugccaauagggauaggu

SEQ ID NO: 1044 - RNA, 21 nt, Artificial Sequence
  CEP290-51/-1367 targeting domain (RNA)
acacugccaauagggauaggu

SEQ ID NO: 1045 - RNA, 19 nt, Artificial Sequence
  CEP290-510 targeting domain (RNA)
acugccaauagggauaggu

SEQ ID NO: 1046 - RNA, 18 nt, Artificial Sequence
  CEP290-511 targeting domain (RNA)
cugccaauagggauaggu

SEQ ID NO: 1047 - RNA, 22 nt, Artificial Sequence
  CEP290-11 targeting domain (RNA)
gacacugccaauagggauaggu

SEQ ID NO: 1048 - skipped

SEQ ID NO: 1049 - RNA, 22 nt, Artificial Sequence
  CEP290-13 targeting domain (RNA)
augagauacucacaauuacaac

SEQ ID NO: 1050 - RNA, 19 nt, Artificial Sequence
  CEP290-53 targeting domain (RNA)
agauacucacaauuacaac

SEQ ID NO: 1051 - RNA, 24 nt, Artificial Sequence
  CEP290-18 targeting sequence (RNA)
guaugagauacucacaauuacaac

SEQ ID NO: 1052 - RNA, 18 nt, Artificial Sequence
  CEP290-55 targeting domain (RNA)
gauacucacaauuacaac

SEQ ID NO: 1053 - RNA, 23 nt, Artificial Sequence
  CEP290-14 targeting domain (RNA)
uaugagauacucacaauuacaac

SEQ ID NO: 1054 - RNA, 21 nt, Artificial Sequence
  CEP290-57 targeting domain (RNA)
ugagauacucacaauuacaac

SEQ ID NO: 1055 - RNA, 21 nt, Artificial Sequence
  CEP290-58 targeting domain (RNA)
augagauauucacaauuacaa

SEQ ID NO: 1056 - RNA, 18 nt, Artificial Sequence
  CEP290-59 targeting domain (RNA)
agauauucacaauuacaa

SEQ ID NO: 1057 - RNA, 24 nt, Artificial Sequence
  CEP290-19 targeting domain (RNA)
gguaugagauauucacaauuacaa

SEQ ID NO: 1058 - RNA, 23 nt, Artificial Sequence
  CEP290-61 targeting domain (RNA)
guaugagauauucacaauuacaa

SEQ ID NO: 1059 - RNA, 19 nt, Artificial Sequence
  CEP290-63 targeting domain (RNA)
gagauauucacaauuacaa

SEQ ID NO: 1060 - RNA, 22 nt, Artificial Sequence
  CEP290-65 targeting domain (RNA)
uaugagauauucacaauuacaa

SEQ ID NO: 1061 - RNA, 20 nt, Artificial Sequence
  CEP290-66 targeting domain (RNA)
ugagauauucacaauuacaa

SEQ ID NO: 1062 - RNA, 17 nt, Artificial Sequence
  CEP290-121 targeting domain (RNA)
aaaaaggagcaugaaac

SEQ ID NO: 1063-1065 - skipped (3 entries)

SEQ ID NO: 1066 - RNA, 20 nt, Artificial Sequence
  CEP290-129 targeting domain (RNA)
aaagaaauagauguagauug

SEQ ID NO: 1067-1069 - skipped (3 entries)

SEQ ID NO: 1070 - RNA, 17 nt, Artificial Sequence
  CEP290-135 targeting domain (RNA)
aacaaacuauucuccca

SEQ ID NO: 1071 - RNA, 20 nt, Artificial Sequence
  CEP290-136 targeting domain (RNA)
aacaguagcugaaauauuaa

SEQ ID NO: 1072 - skipped

SEQ ID NO: 1073 - RNA, 20 nt, Artificial Sequence
  CEP290-138 targeting domain (RNA)
aacuauucucccaugguccc

SEQ ID NO: 1074 - RNA, 20 nt, Artificial Sequence
  CEP290-141 targeting domain (RNA)
aaggaaauacaaaaacugga

SEQ ID NO: 1075 - RNA, 17 nt, Artificial Sequence
  CEP290-142 targeting domain (RNA)
aagguauagaguucaag

SEQ ID NO: 1076 - RNA, 17 nt, Artificial Sequence
  CEP290-143 targeting domain (RNA)
aagguucaugagacuag

SEQ ID NO: 1077 - RNA, 20 nt, Artificial Sequence
  CEP290-144 targeting domain (RNA)
aauaguuuguucuggguaca

SEQ ID NO: 1078 - skipped

SEQ ID NO: 1079 - RNA, 20 nt, Artificial Sequence
  CEP290-146 targeting domain (RNA)
aauauauuaucuauuuauag

SEQ ID NO: 1080 - RNA, 17 nt, Artificial Sequence
  CEP290-147 targeting domain (RNA)
aauauuguaaucaaagg

SEQ ID NO: 1081 - RNA, 17 nt, Artificial Sequence
  CEP290-148 targeting domain (RNA)
aauauuucagcuacugu

SEQ ID NO: 1082 - RNA, 20 nt, Artificial Sequence
  CEP290-149 targeting domain (RNA)
aauuauuguugcuuuuugag

SEQ ID NO: 1083 - skipped

SEQ ID NO: 1084 - RNA, 17 nt, Artificial Sequence
  CEP290-151 targeting domain (RNA)
acaaaagccagggacca

SEQ ID NO: 1085 - RNA, 20 nt, Artificial Sequence
  CEP290-153/-1200 targeting domain (RNA)
acagagugcauccauggucc

SEQ ID NO: 1086 - skipped

SEQ ID NO: 1087 - RNA, 20 nt, Artificial Sequence
  CEP290-155/-1080 targeting domain (RNA)
accagacaucuaagagaaaa

SEQ ID NO: 1088 - skipped

SEQ ID NO: 1089 - RNA, 20 nt, Artificial Sequence
  CEP290-159/-1228 targeting domain (RNA)
agaauauuguaaucaaagga

SEQ ID NO: 1090 - RNA, 17 nt, Artificial Sequence
  CEP290-160 targeting domain (RNA)
agacaucuaagagaaaa

SEQ ID NO: 1091-1092 - skipped (2 entries)

SEQ ID NO: 1093 - RNA, 17 nt, Artificial Sequence
  CEP290-164 targeting domain (RNA)
agaugucugguuaaaag

SEQ ID NO: 1094-1095 - skipped (2 entries)

SEQ ID NO: 1096 - RNA, 20 nt, Artificial Sequence
  CEP290-168 targeting domain (RNA)
aggaaauacaaaaacuggau

SEQ ID NO: 1097-1100 - skipped (4 entries)

SEQ ID NO: 1101 - RNA, 20 nt, Artificial Sequence
  CEP290-173/-1238 targeting domain (RNA)
agguagaauauuguaaucaa

SEQ ID NO: 1102 - RNA, 17 nt, Artificial Sequence
  CEP290-174 targeting domain (RNA)
aguagcugaaauauuaa

SEQ ID NO: 1103 - RNA, 17 nt, Artificial Sequence
  CEP290-177 targeting domain (RNA)
aguuuguucuggguaca

SEQ ID NO: 1104-1106 - skipped (3 entries)

SEQ ID NO: 1107 - RNA, 20 nt, Artificial Sequence
  CEP290-181 targeting domain (RNA)
auaguuuguucuggguacag

SEQ ID NO: 1108 - skipped

SEQ ID NO: 1109 - RNA, 17 nt, Artificial Sequence
  CEP290-183 targeting domain (RNA)
auauuaagggcucuucc

SEQ ID NO: 1110 - RNA, 17 nt, Artificial Sequence
  CEP290-184 targeting domain (RNA)
auauuguaaucaaagga

SEQ ID NO: 1111 - RNA, 17 nt, Artificial Sequence
  CEP290-185 targeting domain (RNA)
aucaugcaagugaccua

SEQ ID NO: 1112-1115 - skipped (4 entries)

SEQ ID NO: 1116 - RNA, 20 nt, Artificial Sequence
  CEP290-192 targeting domain (RNA)
augggagaauaguuuguucu

SEQ ID NO: 1117 - skipped

SEQ ID NO: 1118 - RNA, 20 nt, Artificial Sequence
  CEP290-195 targeting domain (RNA)
auuccaaggaacaaaagcca

SEQ ID NO: 1119 - RNA, 20 nt, Artificial Sequence
  CEP290-196 targeting domain (RNA)
auugagguagaaucaagaag

SEQ ID NO: 1120 - RNA, 17 nt, Artificial Sequence
  CEP290-198 targeting domain (RNA)
caaaagccagggaccau

SEQ ID NO: 1121 - RNA, 20 nt, Artificial Sequence
  CEP290-199 targeting domain (RNA)
caacaguagcugaaauauua

SEQ ID NO: 1122 - skipped

SEQ ID NO: 1123 - RNA, 20 nt, Artificial Sequence
  CEP290-201 targeting domain (RNA)
cagaacaaacuauucuccca

SEQ ID NO: 1124 - RNA, 20 nt, Artificial Sequence
  CEP290-202/-650 targeting domain (RNA)
cagauuucaugugugaagaa

SEQ ID NO: 1125 - skipped

SEQ ID NO: 1126 - RNA, 20 nt, Artificial Sequence
  CEP290-205 targeting domain (RNA)
cagggguaagagaaagggau

SEQ ID NO: 1127 - skipped

SEQ ID NO: 1128 - RNA, 17 nt, Artificial Sequence
  CEP290-207 targeting domain (RNA)
caguagcugaaauauua

SEQ ID NO: 1129 - skipped

SEQ ID NO: 1130 - RNA, 20 nt, Artificial Sequence
  CEP290-209 targeting domain (RNA)
caugggagaauaguuuguuc

SEQ ID NO: 1131 - RNA, 20 nt, Artificial Sequence
  CEP290-211/-1104 targeting domain (RNA)
cauuccaaggaacaaaagcc

SEQ ID NO: 1132-1139 - skipped (8 entries)

SEQ ID NO: 1140 - RNA, 20 nt, Artificial Sequence
  CEP290-226 targeting domain (RNA)
cuggcuuuuguuccuuggaa

SEQ ID NO: 1141 - RNA, 17 nt, Artificial Sequence
  CEP290-227 targeting domain (RNA)
cuguaagauaacuacaa

SEQ ID NO: 1142 - skipped

SEQ ID NO: 1143 - RNA, 20 nt, Artificial Sequence
  CEP290-229 targeting domain (RNA)
cuuaauauuucagcuacugu

SEQ ID NO: 1144 - RNA, 20 nt, Artificial Sequence
  CEP290-231 targeting domain (RNA)
cuuagaugucugguuaaaag

SEQ ID NO: 1145-1147 - skipped (3 entries)

SEQ ID NO: 1148 - RNA, 17 nt, Artificial Sequence
  CEP290-236 targeting domain (RNA)
gaaauacaaaaacugga

SEQ ID NO: 1149 - RNA, 20 nt, Artificial Sequence
  CEP290-239 targeting domain (RNA)
ggagugcaguggagugaucu

SEQ ID NO: 1150 - RNA, 17 nt, Artificial Sequence
  CEP290-240 targeting domain (RNA)
gggguaagagaaaggga

SEQ ID NO: 1151 - RNA, 17 nt, Artificial Sequence
  CEP290-241 targeting domain (RNA)
ggguaagagaaagggau

SEQ ID NO: 1152 - RNA, 17 nt, Artificial Sequence
  CEP290-242 targeting domain (RNA)
gucucacuguguugccc

SEQ ID NO: 1153 - RNA, 17 nt, Artificial Sequence
  CEP290-243 targeting domain (RNA)
gugcaguggagugaucu

SEQ ID NO: 1154 - RNA, 20 nt, Artificial Sequence
  CEP290-244/-973 targeting domain (RNA)
guguguguguguguguuaug

SEQ ID NO: 1155 - RNA, 17 nt, Artificial Sequence
  CEP290-245 targeting domain (RNA)
guguguguguguuaugu

SEQ ID NO: 1156 - RNA, 17 nt, Artificial Sequence
  CEP290-246 targeting domain (RNA)
aaauacaaaaacuggau

SEQ ID NO: 1157-1159 - skipped (3 entries)

SEQ ID NO: 1160 - RNA, 20 nt, Artificial Sequence
  CEP290-251 targeting domain (RNA)
acagggguaagagaaaggga

SEQ ID NO: 1161 - RNA, 20 nt, Artificial Sequence
  CEP290-254 targeting domain (RNA)
acuccacugcacuccagccu

SEQ ID NO: 1162 - skipped

SEQ ID NO: 1163 - RNA, 20 nt, Artificial Sequence
  CEP290-256 targeting domain (RNA)
agagucucacuguguugccc

SEQ ID NO: 1164 - skipped

SEQ ID NO: 1165 - RNA, 17 nt, Artificial Sequence
  CEP290-258 targeting domain (RNA)
auauuaucuauuuauag

SEQ ID NO: 1166 - RNA, 17 nt, Artificial Sequence
  CEP290-259 targeting domain (RNA)
auuucaugugugaagaa

SEQ ID NO: 1167-1168 - skipped (2 entries)

SEQ ID NO: 1169 - RNA, 20 nt, Artificial Sequence
  CEP290-262 targeting domain (RNA)
cacuccacugcacuccagcc

SEQ ID NO: 1170 - RNA, 17 nt, Artificial Sequence
  CEP290-263 targeting domain (RNA)
cacuguguugcccaggc

SEQ ID NO: 1171 - RNA, 17 nt, Artificial Sequence
  CEP290-264 targeting domain (RNA)
ccaaggaacaaaagcca

SEQ ID NO: 1172 - RNA, 17 nt, Artificial Sequence
  CEP290-265 targeting domain (RNA)
ccacugcacuccagccu

SEQ ID NO: 1173 - RNA, 17 nt, Artificial Sequence
  CEP290-266 targeting domain (RNA)
cccaggcuggagugcag

SEQ ID NO: 1174 - RNA, 17 nt, Artificial Sequence
  CEP290-267 targeting domain (RNA)
cccuggcuuuuguuccu

SEQ ID NO: 1175 - RNA, 20 nt, Artificial Sequence
  CEP290-268 targeting domain (RNA)
cgcuugaaccugggaggcag

SEQ ID NO: 1176 - RNA, 17 nt, Artificial Sequence
  CEP290-269 targeting domain (RNA)
uaaggaaauacaaaaac

SEQ ID NO: 1177 - RNA, 20 nt, Artificial Sequence
  CEP290-270 targeting domain (RNA)
uaauaaggaaauacaaaaac

SEQ ID NO: 1178 - RNA, 20 nt, Artificial Sequence
  CEP290-271 targeting domain (RNA)
uacugcaaccucugccuccc

SEQ ID NO: 1179-1180 - skipped (2 entries)

SEQ ID NO: 1181 - RNA, 17 nt, Artificial Sequence
  CEP290-274 targeting domain (RNA)
uccacugcacuccagcc

SEQ ID NO: 1182 - RNA, 20 nt, Artificial Sequence
  CEP290-275/-784 targeting domain (RNA)
ucucacuguguugcccaggc

SEQ ID NO: 1183 - skipped

SEQ ID NO: 1184 - RNA, 17 nt, Artificial Sequence
  CEP290-277 targeting domain (RNA)
ugcaaccucugccuccc

SEQ ID NO: 1185 - RNA, 20 nt, Artificial Sequence
  CEP290-278/-1197 targeting domain (RNA)
uguguguguguguguuaugu

SEQ ID NO: 1186 - RNA, 17 nt, Artificial Sequence
  CEP290-279 targeting domain (RNA)
uguguguguguguuaug

SEQ ID NO: 1187 - skipped

SEQ ID NO: 1188 - RNA, 17 nt, Artificial Sequence
  CEP290-281 targeting domain (RNA)
uugaaccugggaggcag

SEQ ID NO: 1189 - RNA, 20 nt, Artificial Sequence
  CEP290-282/-773 targeting domain (RNA)
uugcccaggcuggagugcag

SEQ ID NO: 1190 - skipped

SEQ ID NO: 1191 - RNA, 21 nt, Artificial Sequence
  CEP290-337 targeting domain (RNA)
aaaucaugcaagugaccuaag

SEQ ID NO: 1192 - RNA, 20 nt, Artificial Sequence
  CEP290-338 targeting domain (RNA)
aaucaugcaagugaccuaag

SEQ ID NO: 1193 - RNA, 19 nt, Artificial Sequence
  CEP290-339 targeting domain (RNA)
aucaugcaagugaccuaag

SEQ ID NO: 1194 - RNA, 20 nt, Artificial Sequence
  CEP290-340 targeting domain (RNA)
aggucacuugcaugauuuag

SEQ ID NO: 1195 - RNA, 24 nt, Artificial Sequence
  CEP290-341 targeting domain (RNA)
aauauuaagggcucuuccuggacc

SEQ ID NO: 1196 - RNA, 23 nt, Artificial Sequence
  CEP290-342 targeting domain (RNA)
auauuaagggcucuuccuggacc

SEQ ID NO: 1197 - RNA, 21 nt, Artificial Sequence
  CEP290-343 targeting domain (RNA)
auuaagggcucuuccuggacc

SEQ ID NO: 1198 - RNA, 18 nt, Artificial Sequence
  CEP290-344 targeting domain (RNA)
aagggcucuuccuggacc

SEQ ID NO: 1199 - RNA, 19 nt, Artificial Sequence
  CEP290-345 targeting domain (RNA)
aggacuuucuaaugcugga

SEQ ID NO: 1200 - RNA, 21 nt, Artificial Sequence
  CEP290-346 targeting domain (RNA)
accaugggagaauaguuuguu

SEQ ID NO: 1201 - RNA, 18 nt, Artificial Sequence
  CEP290-347 targeting domain (RNA)
augggagaauaguuuguu

SEQ ID NO: 1202 - RNA, 23 nt, Artificial Sequence
  CEP290-348 targeting domain (RNA)
acuccugugaaaggaucuuagau

SEQ ID NO: 1203 - RNA, 23 nt, Artificial Sequence
  CEP290-349 targeting domain (RNA)
aaaacguuguucugaguagcuuu

SEQ ID NO: 1204 - RNA, 22 nt, Artificial Sequence
  CEP290-350 targeting domain (RNA)
aaacguuguucugaguagcuuu

SEQ ID NO: 1205 - RNA, 21 nt, Artificial Sequence
  CEP290-351 targeting domain (RNA)
aacguuguucugaguagcuuu

SEQ ID NO: 1206 - skipped

SEQ ID NO: 1207 - RNA, 22 nt, Artificial Sequence
  CEP290-353 targeting domain (RNA)
auuuauaguggcugaaugacuu

SEQ ID NO: 1208 - RNA, 18 nt, Artificial Sequence
  CEP290-354 targeting domain (RNA)
auaguggcugaaugacuu

SEQ ID NO: 1209 - RNA, 22 nt, Artificial Sequence
  CEP290-355 targeting domain (RNA)
auggucccuggcuuuuguuccu

SEQ ID NO: 1210 - RNA, 24 nt, Artificial Sequence
  CEP290-356 targeting domain (RNA)
agacaucuuguggauaauguauca

SEQ ID NO: 1211 - RNA, 22 nt, Artificial Sequence
  CEP290-357 targeting domain (RNA)
acaucuuguggauaauguauca

SEQ ID NO: 1212 - skipped

SEQ ID NO: 1213 - RNA, 24 nt, Artificial Sequence
  CEP290-359 targeting domain (RNA)
aaaguccuaggcaagagacaucuu

SEQ ID NO: 1214 - RNA, 23 nt, Artificial Sequence
  CEP290-360 targeting domain (RNA)
aaguccuaggcaagagacaucuu

SEQ ID NO: 1215 - RNA, 22 nt, Artificial Sequence
  CEP290-361 targeting domain (RNA)
aguccuaggcaagagacaucuu

SEQ ID NO: 1216 - RNA, 24 nt, Artificial Sequence
  CEP290-362 targeting domain
agccagcaaaagcuuuugagcuaa

SEQ ID NO: 1217 - skipped

SEQ ID NO: 1218 - RNA, 22 nt, Artificial Sequence
  CEP290-364 targeting domain (RNA)
agaucuuauucuacuccuguga

SEQ ID NO: 1219 - skipped

SEQ ID NO: 1220 - RNA, 22 nt, Artificial Sequence
  CEP290-366 targeting domain (RNA)
aucuaagauccuuucacaggag

SEQ ID NO: 1221 - RNA, 18 nt, Artificial Sequence
  CEP290-369 targeting domain (RNA)
aagauccuuucacaggag

SEQ ID NO: 1222 - RNA, 24 nt, Artificial Sequence
  CEP290-370 targeting domain (RNA)
agcuuucaggauuccuacuaaauu

SEQ ID NO: 1223 - RNA, 23 nt, Artificial Sequence
  CEP290-371 targeting domain (RNA)
acucagaacaacguuuucauuua

SEQ ID NO: 1224 - RNA, 19 nt, Artificial Sequence
  CEP290-372 targeting domain (RNA)
agaacaacguuuucauuua

SEQ ID NO: 1225 - RNA, 22 nt, Artificial Sequence
  CEP290-373 targeting domain (RNA)
agaauaucauaaguuacaaucu

SEQ ID NO: 1226 - RNA, 20 nt, Artificial Sequence
  CEP290-375 targeting domain (RNA)
aauaucauaaguuacaaucu

SEQ ID NO: 1227 - RNA, 19 nt, Artificial Sequence
  CEP290-376 targeting domain (RNA)
auaucauaaguuacaaucu

SEQ ID NO: 1228 - RNA, 22 nt, Artificial Sequence
  CEP290-377 targeting domain (RNA)
aaguggcuguaagauaacuaca

SEQ ID NO: 1229 - RNA, 21 nt, Artificial Sequence
  CEP290-378 targeting domain (RNA)
aguggcuguaagauaacuaca

SEQ ID NO: 1230 - RNA, 24 nt, Artificial Sequence
  CEP290-379 targeting domain (RNA)
auguuuaacguuaucauuuuccca

SEQ ID NO: 1231 - RNA, 18 nt, Artificial Sequence
  CEP290-380 targeting domain (RNA)
aacguuaucauuuuccca

SEQ ID NO: 1232 - RNA, 22 nt, Artificial Sequence
  CEP290-381 targeting domain (RNA)
aagagaaagggaugggcacuua

SEQ ID NO: 1233 - RNA, 21 nt, Artificial Sequence
  CEP290-382 targeting domain (RNA)
agagaaagggaugggcacuua

SEQ ID NO: 1234 - RNA, 19 nt, Artificial Sequence
  CEP290-383 targeting domain (RNA)
agaaagggaugggcacuua

SEQ ID NO: 1235 - RNA, 23 nt, Artificial Sequence
  CEP290-384 targeting domain (RNA)
auucaguaaaugaaaacguuguu

SEQ ID NO: 1236 - RNA, 19 nt, Artificial Sequence
  CEP290-385 targeting domain (RNA)
aguaaaugaaaacguuguu

SEQ ID NO: 1237 - RNA, 23 nt, Artificial Sequence
  CEP290-386 targeting domain (RNA)
auaaacaugacucauaauuuagu

SEQ ID NO: 1238 - RNA, 21 nt, Artificial Sequence
  CEP290-387 targeting domain (RNA)
aaacaugacucauaauuuagu

SEQ ID NO: 1239 - skipped

SEQ ID NO: 1240 - RNA, 19 nt, Artificial Sequence
  CEP290-389 targeting domain (RNA)
acaugacucauaauuuagu

SEQ ID NO: 1241 - RNA, 23 nt, Artificial Sequence
  CEP290-390 targeting domain (RNA)
auucuuaucuaagauccuuucac

SEQ ID NO: 1242 - RNA, 24 nt, Artificial Sequence
  CEP290-391 targeting domain (RNA)
aggaacaaaagccagggaccaugg

SEQ ID NO: 1243 - RNA, 21 nt, Artificial Sequence
  CEP290-392 targeting domain (RNA)
aacaaaagccagggaccaugg

SEQ ID NO: 1244 - RNA, 20 nt, Artificial Sequence
  CEP290-393 targeting domain (RNA)
acaaaagccagggaccaugg

SEQ ID NO: 1245 - RNA, 18 nt, Artificial Sequence
  CEP290-394 targeting domain (RNA)
aaaagccagggaccaugg

SEQ ID NO: 1246 - RNA, 21 nt, Artificial Sequence
  CEP290-395 targeting domain (RNA)
agaauaguuuguucuggguac

SEQ ID NO: 1247 - RNA, 19 nt, Artificial Sequence
  CEP290-396 targeting domain (RNA)
aauaguuuguucuggguac

SEQ ID NO: 1248 - RNA, 18 nt, Artificial Sequence
  CEP290-397 targeting domain (RNA)
auaguuuguucuggguac

SEQ ID NO: 1249 - RNA, 24 nt, Artificial Sequence
  CEP290-398 targeting domain (RNA)
aucagaaauagaggcuuauggauu

SEQ ID NO: 1250 - RNA, 21 nt, Artificial Sequence
  CEP290-399 targeting domain (RNA)
agaaauagaggcuuauggauu

SEQ ID NO: 1251 - RNA, 19 nt, Artificial Sequence
  CEP290-400 targeting domain (RNA)
aaauagaggcuuauggauu

SEQ ID NO: 1252 - RNA, 18 nt, Artificial Sequence
  CEP290-401 targeting domain (RNA)
aauagaggcuuauggauu

SEQ ID NO: 1253 - RNA, 23 nt, Artificial Sequence
  CEP290-402 targeting domain (RNA)
aauauauuaucuauuuauagugg

SEQ ID NO: 1254 - RNA, 22 nt, Artificial Sequence
  CEP290-403 targeting domain (RNA)
auauauuaucuauuuauagugg

SEQ ID NO: 1255 - RNA, 20 nt, Artificial Sequence
  CEP290-404 targeting domain (RNA)
auauuaucuauuuauagugg

SEQ ID NO: 1256 - RNA, 18 nt, Artificial Sequence
  CEP290-405 targeting domain (RNA)
auuaucuauuuauagugg

SEQ ID NO: 1257 - RNA, 22 nt, Artificial Sequence
  CEP290-406 targeting domain (RNA)
aaauucucaucauuuuuuauug

SEQ ID NO: 1258 - RNA, 21 nt, Artificial Sequence
  CEP290-407 targeting domain (RNA)
aauucucaucauuuuuuauug

SEQ ID NO: 1259 - RNA, 20 nt, Artificial Sequence
  CEP290-408 targeting domain (RNA)
auucucaucauuuuuuauug

SEQ ID NO: 1260 - RNA, 22 nt, Artificial Sequence
  CEP290-409 targeting domain (RNA)
agaggauaggacagaggacaug

SEQ ID NO: 1261 - skipped

SEQ ID NO: 1262 - RNA, 23 nt, Artificial Sequence
  CEP290-411 targeting domain (RNA)
agaauaaauguagaauuuuaaug

SEQ ID NO: 1263 - RNA, 21 nt, Artificial Sequence
  CEP290-412 targeting domain (RNA)
aauaaauguagaauuuuaaug

SEQ ID NO: 1264 - RNA, 20 nt, Artificial Sequence
  CEP290-413 targeting domain (RNA)
auaaauguagaauuuuaaug

SEQ ID NO: 1265 - RNA, 18 nt, Artificial Sequence
  CEP290-414 targeting domain (RNA)
aaauguagaauuuuaaug

SEQ ID NO: 1266 - RNA, 22 nt, Artificial Sequence
  CEP290-415 targeting domain (RNA)
auuuuuuauuguagaauaaaug

SEQ ID NO: 1267 - RNA, 23 nt, Artificial Sequence
  CEP290-416 targeting domain (RNA)
cuaaaucaugcaagugaccuaag

SEQ ID NO: 1268 - RNA, 24 nt, Artificial Sequence
  CEP290-417 targeting domain (RNA)
ccuuaggucacuugcaugauuuag

SEQ ID NO: 1269 - RNA, 23 nt, Artificial Sequence
  CEP290-418 targeting domain (RNA)
cuuaggucacuugcaugauuuag

SEQ ID NO: 1270 - RNA, 22 nt, Artificial Sequence
  CEP290-419 targeting domain (RNA)
ccuaggacuuucuaaugcugga

SEQ ID NO: 1271 - RNA, 21 nt, Artificial Sequence
  CEP290-420 targeting domain (RNA)
cuaggacuuucuaaugcugga

SEQ ID NO: 1272 - RNA, 20 nt, Artificial Sequence
  CEP290-421 targeting domain (RNA)
ccaugggagaauaguuuguu

SEQ ID NO: 1273 - RNA, 19 nt, Artificial Sequence
  CEP290-422 targeting domain (RNA)
caugggagaauaguuuguu

SEQ ID NO: 1274 - RNA, 22 nt, Artificial Sequence
  CEP290-423 targeting domain (RNA)
cuccugugaaaggaucuuagau

SEQ ID NO: 1275 - skipped

SEQ ID NO: 1276 - RNA, 19 nt, Artificial Sequence
  CEP290-426 targeting domain (RNA)
cugugaaaggaucuuagau

SEQ ID NO: 1277 - RNA, 21 nt, Artificial Sequence
  CEP290-427 targeting domain (RNA)
cccuggcuuuuguuccuugga

SEQ ID NO: 1278 - RNA, 20 nt, Artificial Sequence
  CEP290-428 targeting domain (RNA)
ccuggcuuuuguuccuugga

SEQ ID NO: 1279 - RNA, 19 nt, Artificial Sequence
  CEP290-429 targeting domain (RNA)
cuggcuuuuguuccuugga

SEQ ID NO: 1280 - RNA, 19 nt, Artificial Sequence
  CEP290-430 targeting domain (RNA)
cguuguucugaguagcuuu

SEQ ID NO: 1281 - RNA, 24 nt, Artificial Sequence
  CEP290-431 targeting domain (RNA)
cuauuuauaguggcugaaugacuu

SEQ ID NO: 1282 - RNA, 24 nt, Artificial Sequence
  CEP290-432 targeting domain (RNA)
ccauggucccuggcuuuuguuccu

SEQ ID NO: 1283 - RNA, 23 nt, Artificial Sequence
  CEP290-433 targeting domain (RNA)
cauggucccuggcuuuuguuccu

SEQ ID NO: 1284 - RNA, 21 nt, Artificial Sequence
  CEP290-434 targeting domain (RNA)
caucuuguggauaauguauca

SEQ ID NO: 1285 - RNA, 18 nt, Artificial Sequence
  CEP290-435 targeting domain (RNA)
cuuguggauaauguauca

SEQ ID NO: 1286 - RNA, 19 nt, Artificial Sequence
  CEP290-437 targeting domain (RNA)
ccuaggcaagagacaucuu

SEQ ID NO: 1287 - RNA, 18 nt, Artificial Sequence
  CEP290-438 targeting domain (RNA)
cuaggcaagagacaucuu

SEQ ID NO: 1288 - RNA, 22 nt, Artificial Sequence
  CEP290-439 targeting domain (RNA)
ccagcaaaagcuuuugagcuaa

SEQ ID NO: 1289 - RNA, 21 nt, Artificial Sequence
  CEP290-440 targeting domain (RNA)
cagcaaaagcuuuugagcuaa

SEQ ID NO: 1290 - RNA, 18 nt, Artificial Sequence
  CEP290-441 targeting domain (RNA)
caaaagcuuuugagcuaa

SEQ ID NO: 1291 - RNA, 18 nt, Artificial Sequence
  CEP290-442 targeting domain (RNA)
cuuauucuacuccuguga

SEQ ID NO: 1292 - skipped

SEQ ID NO: 1293 - RNA, 24 nt, Artificial Sequence
  CEP290-444 targeting domain (RNA)
cuuccucaucagaaauagaggcuu

SEQ ID NO: 1294 - RNA, 21 nt, Artificial Sequence
  CEP290-445 targeting domain (RNA)
ccucaucagaaauagaggcuu

SEQ ID NO: 1295 - skipped

SEQ ID NO: 1296 - RNA, 18 nt, Artificial Sequence
  CEP290-447 targeting domain (RNA)
caucagaaauagaggcuu

SEQ ID NO: 1297 - RNA, 22 nt, Artificial Sequence
  CEP290-448 targeting domain (RNA)
cuuucaggauuccuacuaaauu

SEQ ID NO: 1298 - RNA, 18 nt, Artificial Sequence
  CEP290-449 targeting domain (RNA)
caggauuccuacuaaauu

SEQ ID NO: 1299 - RNA, 19 nt, Artificial Sequence
  CEP290-450 targeting domain (RNA)
cuguccucaguaaaaggua

SEQ ID NO: 1300 - RNA, 22 nt, Artificial Sequence
  CEP290-451 targeting domain (RNA)
cucagaacaacguuuucauuua

SEQ ID NO: 1301 - skipped

SEQ ID NO: 1302 - RNA, 23 nt, Artificial Sequence
  CEP290-453 targeting domain (RNA)
caaguggcuguaagauaacuaca

SEQ ID NO: 1303 - RNA, 24 nt, Artificial Sequence
  CEP290-454 targeting domain (RNA)
cauucaguaaaugaaaacguuguu

SEQ ID NO: 1304 - skipped

SEQ ID NO: 1305 - RNA, 18 nt, Artificial Sequence
  CEP290-458 targeting domain (RNA)
caugacucauaauuuagu

SEQ ID NO: 1306 - skipped

SEQ ID NO: 1307 - RNA, 19 nt, Artificial Sequence
  CEP290-460 targeting domain (RNA)
caaaagccagggaccaugg

SEQ ID NO: 1308 - RNA, 22 nt, Artificial Sequence
  CEP290-461 targeting domain (RNA)
cagaaauagaggcuuauggauu

SEQ ID NO: 1309 - RNA, 21 nt, Artificial Sequence
  CEP290-462 targeting domain (RNA)
cuggguacagggguaagagaa

SEQ ID NO: 1310 - RNA, 24 nt, Artificial Sequence
  CEP290-463 targeting domain (RNA)
caauauauuaucuauuuauagugg

SEQ ID NO: 1311 - RNA, 23 nt, Artificial Sequence
  CEP290-464 targeting domain (RNA)
cauuuuuuauuguagaauaaaug

SEQ ID NO: 1312 - RNA, 22 nt, Artificial Sequence
  Targeting domain
uaaaucaugcaagugaccuaag

SEQ ID NO: 1313 - RNA, 18 nt, Artificial Sequence
  Targeting domain
ucaugcaagugaccuaag

SEQ ID NO: 1314 - RNA, 22 nt, Artificial Sequence
  Targeting domain
uuaggucacuugcaugauuuag

SEQ ID NO: 1315 - RNA, 21 nt, Artificial Sequence
  Targeting domain
uaggucacuugcaugauuuag

SEQ ID NO: 1316 - RNA, 22 nt, Artificial Sequence
  Targeting domain
uauuaagggcucuuccuggacc

SEQ ID NO: 1317 - RNA, 20 nt, Artificial Sequence
  Targeting domain
uuaagggcucuuccuggacc

SEQ ID NO: 1318 - RNA, 19 nt, Artificial Sequence
  Targeting domain
uaagggcucuuccuggacc

SEQ ID NO: 1319 - RNA, 24 nt, Artificial Sequence
  Targeting domain
ugccuaggacuuucuaaugcugga

SEQ ID NO: 1320 - skipped

SEQ ID NO: 1321 - RNA, 24 nt, Artificial Sequence
  CEP290-474 targeting domain (RNA)
uacuccugugaaaggaucuuagau

SEQ ID NO: 1322 - RNA, 21 nt, Artificial Sequence
  Targeting domain
uccugugaaaggaucuuagau

SEQ ID NO: 1323 - RNA, 18 nt, Artificial Sequence
  Targeting domain
ugugaaaggaucuuagau

SEQ ID NO: 1324 - RNA, 22 nt, Artificial Sequence
  Targeting domain
ucccuggcuuuuguuccuugga

SEQ ID NO: 1325 - RNA, 18 nt, Artificial Sequence
  Targeting domain
uggcuuuuguuccuugga

SEQ ID NO: 1326 - RNA, 23 nt, Artificial Sequence
  Targeting domain
uauuuauaguggcugaaugacuu

SEQ ID NO: 1327 - RNA, 21 nt, Artificial Sequence
  Targeting domain
uuuauaguggcugaaugacuu

SEQ ID NO: 1328 - RNA, 20 nt, Artificial Sequence
  Targeting domain
uuauaguggcugaaugacuu

SEQ ID NO: 1329 - RNA, 19 nt, Artificial Sequence
  Targeting domain
uauaguggcugaaugacuu

SEQ ID NO: 1330 - RNA, 21 nt, Artificial Sequence
  Targeting domain
uggucccuggcuuuuguuccu

SEQ ID NO: 1331 - RNA, 18 nt, Artificial Sequence
  Targeting domain
ucccuggcuuuuguuccu

SEQ ID NO: 1332 - RNA, 19 nt, Artificial Sequence
  Targeting domain
ucuuguggauaauguauca

SEQ ID NO: 1333 - skipped

SEQ ID NO: 1334 - RNA, 24 nt, Artificial Sequence
  Targeting domain
uuagaucuuauucuacuccuguga

SEQ ID NO: 1335 - RNA, 23 nt, Artificial Sequence
  Targeting domain
uagaucuuauucuacuccuguga

SEQ ID NO: 1336 - RNA, 19 nt, Artificial Sequence
  Targeting domain
ucuuauucuacuccuguga

SEQ ID NO: 1337 - RNA, 24 nt, Artificial Sequence
  CEP290-527 targeting domain (RNA)
uuaucuaagauccuuucacaggag

SEQ ID NO: 1338 - RNA, 23 nt, Artificial Sequence
  CEP290-528 targeting domain (RNA)
uaucuaagauccuuucacaggag

SEQ ID NO: 1339 - RNA, 21 nt, Artificial Sequence
  CEP290-529 targeting domain (RNA)
ucuaagauccuuucacaggag

SEQ ID NO: 1340 - RNA, 19 nt, Artificial Sequence
  Targeting domain
uaagauccuuucacaggag

SEQ ID NO: 1341 - RNA, 23 nt, Artificial Sequence
  Targeting domain
uuccucaucagaaauagaggcuu

SEQ ID NO: 1342 - RNA, 22 nt, Artificial Sequence
  Targeting domain
uccucaucagaaauagaggcuu

SEQ ID NO: 1343 - RNA, 19 nt, Artificial Sequence
  Targeting domain
ucaucagaaauagaggcuu

SEQ ID NO: 1344 - RNA, 21 nt, Artificial Sequence
  Targeting domain
uuucaggauuccuacuaaauu

SEQ ID NO: 1345 - skipped

SEQ ID NO: 1346 - RNA, 19 nt, Artificial Sequence
  Targeting domain
ucaggauuccuacuaaauu

SEQ ID NO: 1347 - RNA, 24 nt, Artificial Sequence
  Targeting domain
uuguucuguccucaguaaaaggua

SEQ ID NO: 1348 - RNA, 23 nt, Artificial Sequence
  Targeting domain
uguucuguccucaguaaaaggua

SEQ ID NO: 1349 - RNA, 21 nt, Artificial Sequence
  Targeting domain
uucuguccucaguaaaaggua

SEQ ID NO: 1350 - skipped

SEQ ID NO: 1351 - RNA, 18 nt, Artificial Sequence
  Targeting domain
uguccucaguaaaaggua

SEQ ID NO: 1352 - RNA, 24 nt, Artificial Sequence
  Targeting domain
uacucagaacaacguuuucauuua

SEQ ID NO: 1353 - RNA, 21 nt, Artificial Sequence
  Targeting domain
ucagaacaacguuuucauuua

SEQ ID NO: 1354 - RNA, 23 nt, Artificial Sequence
  Targeting domain
uagaauaucauaaguuacaaucu

SEQ ID NO: 1355 - RNA, 18 nt, Artificial Sequence
  Targeting domain
uaucauaaguuacaaucu

SEQ ID NO: 1356 - RNA, 24 nt, Artificial Sequence
  Targeting domain
ucaaguggcuguaagauaacuaca

SEQ ID NO: 1357 - RNA, 19 nt, Artificial Sequence
  Targeting domain
uggcuguaagauaacuaca

SEQ ID NO: 1358 - RNA, 23 nt, Artificial Sequence
  Targeting domain
uguuuaacguuaucauuuuccca

SEQ ID NO: 1359 - RNA, 21 nt, Artificial Sequence
  Targeting domain
uuuaacguuaucauuuuccca

SEQ ID NO: 1360 - skipped

SEQ ID NO: 1361 - RNA, 19 nt, Artificial Sequence
  Targeting domain
uaacguuaucauuuuccca

SEQ ID NO: 1362 - RNA, 23 nt, Artificial Sequence
  Targeting domain
uaagagaaagggaugggcacuua

SEQ ID NO: 1363 - RNA, 22 nt, Artificial Sequence
  Targeting domain
uucaguaaaugaaaacguuguu

SEQ ID NO: 1364 - RNA, 21 nt, Artificial Sequence
  Targeting domain
ucaguaaaugaaaacguuguu

SEQ ID NO: 1365 - RNA, 22 nt, Artificial Sequence
  Targeting domain
uaaacaugacucauaauuuagu

SEQ ID NO: 1366 - RNA, 24 nt, Artificial Sequence
  Targeting domain
uauucuuaucuaagauccuuucac

SEQ ID NO: 1367 - RNA, 22 nt, Artificial Sequence
  Targeting domain
uucuuaucuaagauccuuucac

SEQ ID NO: 1368 - RNA, 21 nt, Artificial Sequence
  Targeting domain
ucuuaucuaagauccuuucac

SEQ ID NO: 1369 - RNA, 19 nt, Artificial Sequence
  Targeting domain
uuaucuaagauccuuucac

SEQ ID NO: 1370 - RNA, 18 nt, Artificial Sequence
  Targeting domain
uaucuaagauccuuucac

SEQ ID NO: 1371 - RNA, 23 nt, Artificial Sequence
  Targeting domain
ucagaaauagaggcuuauggauu

SEQ ID NO: 1372 - RNA, 23 nt, Artificial Sequence
  Targeting domain
uucuggguacagggguaagagaa

SEQ ID NO: 1373 - RNA, 22 nt, Artificial Sequence
  Targeting domain
ucuggguacagggguaagagaa

SEQ ID NO: 1374 - RNA, 20 nt, Artificial Sequence
  Targeting domain
uggguacagggguaagagaa

SEQ ID NO: 1375 - RNA, 21 nt, Artificial Sequence
  Targeting domain
uauauuaucuauuuauagugg

SEQ ID NO: 1376 - RNA, 19 nt, Artificial Sequence
  Targeting domain
uauuaucuauuuauagugg

SEQ ID NO: 1377 - RNA, 23 nt, Artificial Sequence
  Targeting domain
uaaauucucaucauuuuuuauug

SEQ ID NO: 1378 - RNA, 19 nt, Artificial Sequence
  Targeting domain
uucucaucauuuuuuauug

SEQ ID NO: 1379 - RNA, 18 nt, Artificial Sequence
  Targeting domain
ucucaucauuuuuuauug

SEQ ID NO: 1380 - RNA, 24 nt, Artificial Sequence
  Targeting domain
uagaauaaauguagaauuuuaaug

SEQ ID NO: 1381 - RNA, 19 nt, Artificial Sequence
  Targeting domain
uaaauguagaauuuuaaug

SEQ ID NO: 1382 - RNA, 24 nt, Artificial Sequence
  CEP290-572 targeting domain (RNA)
ucauuuuuuauuguagaauaaaug

SEQ ID NO: 1383 - RNA, 21 nt, Artificial Sequence
  Targeting domain
uuuuuuauuguagaauaaaug

SEQ ID NO: 1384 - RNA, 20 nt, Artificial Sequence
  Targeting domain
uuuuuauuguagaauaaaug

SEQ ID NO: 1385 - RNA, 19 nt, Artificial Sequence
  Targeting domain
uuuuauuguagaauaaaug

SEQ ID NO: 1386 - RNA, 18 nt, Artificial Sequence
  Targeting domain
uuuauuguagaauaaaug

SEQ ID NO: 1387 - RNA, 19 nt, Artificial Sequence
  Targeting domain
aaaagcuaccgguuaccug

SEQ ID NO: 1388 - RNA, 18 nt, Artificial Sequence
  Targeting domain
aaagcuaccgguuaccug

SEQ ID NO: 1389 - RNA, 24 nt, Artificial Sequence
  Targeting domain
aguuuuuaaggcggggagucacau

SEQ ID NO: 1390 - RNA, 19 nt, Artificial Sequence
  Targeting domain
acauccuccuuacugccac

SEQ ID NO: 1391 - RNA, 23 nt, Artificial Sequence
  CEP290-581 targeting domain (RNA)
agucacaggguaggauucauguu

SEQ ID NO: 1392 - RNA, 19 nt, Artificial Sequence
  Targeting domain
acaggguaggauucauguu

SEQ ID NO: 1393 - RNA, 21 nt, Artificial Sequence
  Targeting domain
acagaguucaagcuaauacau

SEQ ID NO: 1394 - RNA, 19 nt, Artificial Sequence
  Targeting domain
agaguucaagcuaauacau

SEQ ID NO: 1395 - RNA, 24 nt, Artificial Sequence
  CEP290-585 targeting domain (RNA)
auaagaugcagaacuaguguagac

SEQ ID NO: 1396 - RNA, 22 nt, Artificial Sequence
  Targeting domain
aagaugcagaacuaguguagac

SEQ ID NO: 1397 - RNA, 21 nt, Artificial Sequence
  Targeting domain
agaugcagaacuaguguagac

SEQ ID NO: 1398 - RNA, 19 nt, Artificial Sequence
  Targeting domain
augcagaacuaguguagac

SEQ ID NO: 1399 - RNA, 18 nt, Artificial Sequence
  Targeting domain
aguaucuccuguuuggca

SEQ ID NO: 1400 - RNA, 23 nt, Artificial Sequence
  CEP290-590 targeting domain (RNA)
acgaaaaucagauuucaugugug

SEQ ID NO: 1401 - RNA, 20 nt, Artificial Sequence
  Targeting domain
aaaaucagauuucaugugug

SEQ ID NO: 1402 - RNA, 19 nt, Artificial Sequence
  Targeting domain
aaaucagauuucaugugug

SEQ ID NO: 1403 - RNA, 18 nt, Artificial Sequence
  Targeting domain
aaucagauuucaugugug

SEQ ID NO: 1404 - RNA, 21 nt, Artificial Sequence
  CEP290-594 targeting domain (RNA)
acaagaaugaucauucuaaac

SEQ ID NO: 1405 - RNA, 19 nt, Artificial Sequence
  Targeting domain
aagaaugaucauucuaaac

SEQ ID NO: 1406 - RNA, 18 nt, Artificial Sequence
  Targeting domain
agaaugaucauucuaaac

SEQ ID NO: 1407 - RNA, 24 nt, Artificial Sequence
  Targeting domain
aggcggggagucacaugggaguca

SEQ ID NO: 1408 - RNA, 23 nt, Artificial Sequence
  Targeting domain
agcuuuugacaguuuuuaaggcg

SEQ ID NO: 1409 - RNA, 24 nt, Artificial Sequence
  Targeting domain
aaugaucauucuuguggcaguaag

SEQ ID NO: 1410 - RNA, 23 nt, Artificial Sequence
  Targeting domain
augaucauucuuguggcaguaag

SEQ ID NO: 1411 - skipped

SEQ ID NO: 1412 - RNA, 23 nt, Artificial Sequence
  Targeting domain
aucuagagcaagagaugaacuag

SEQ ID NO: 1413 - RNA, 19 nt, Artificial Sequence
  Targeting domain
agagcaagagaugaacuag

SEQ ID NO: 1414 - RNA, 23 nt, Artificial Sequence
  Targeting domain
aaugccugaacaaguuuugaaac

SEQ ID NO: 1415 - RNA, 22 nt, Artificial Sequence
  Targeting domain
augccugaacaaguuuugaaac

SEQ ID NO: 1416 - RNA, 21 nt, Artificial Sequence
  Targeting domain
agauugagguagaaucaagaa

SEQ ID NO: 1417 - RNA, 19 nt, Artificial Sequence
  Targeting domain
auugagguagaaucaagaa

SEQ ID NO: 1418 - RNA, 22 nt, Artificial Sequence
  Targeting domain
auguaagacuggagauagagac

SEQ ID NO: 1419 - RNA, 18 nt, Artificial Sequence
  Targeting domain
aagacuggagauagagac

SEQ ID NO: 1420 - RNA, 21 nt, Artificial Sequence
  Targeting domain
agucacaugggagucacaggg

SEQ ID NO: 1421 - RNA, 19 nt, Artificial Sequence
  Targeting domain
acauaucugucuuccuuaa

SEQ ID NO: 1422 - RNA, 24 nt, Artificial Sequence
  Targeting domain
aaaucagauuucaugugugaagaa

SEQ ID NO: 1423 - RNA, 23 nt, Artificial Sequence
  Targeting domain
aaucagauuucaugugugaagaa

SEQ ID NO: 1424 - RNA, 22 nt, Artificial Sequence
  Targeting domain
aucagauuucaugugugaagaa

SEQ ID NO: 1425 - RNA, 19 nt, Artificial Sequence
  Targeting domain
agauuucaugugugaagaa

SEQ ID NO: 1426-1430 - skipped (5 entries)

SEQ ID NO: 1431 - RNA, 24 nt, Artificial Sequence
  Targeting domain
aacuauuuaauuuguuucugugug

SEQ ID NO: 1432 - RNA, 23 nt, Artificial Sequence
  Targeting domain
acuauuuaauuuguuucugugug

SEQ ID NO: 1433 - skipped

SEQ ID NO: 1434 - RNA, 24 nt, Artificial Sequence
  Targeting domain
cugucaaaagcuaccgguuaccug

SEQ ID NO: 1435 - skipped

SEQ ID NO: 1436 - RNA, 22 nt, Artificial Sequence
  CEP290-627 targeting domain (RNA)
cuuacauccuccuuacugccac

SEQ ID NO: 1437 - RNA, 18 nt, Artificial Sequence
  CEP290-628 targeting domain (RNA)
cauccuccuuacugccac

SEQ ID NO: 1438 - skipped

SEQ ID NO: 1439 - RNA, 18 nt, Artificial Sequence
  Targeting domain
caggguaggauucauguu

SEQ ID NO: 1440 - RNA, 22 nt, Artificial Sequence
  Targeting domain
cacagaguucaagcuaauacau

SEQ ID NO: 1441 - skipped

SEQ ID NO: 1442 - RNA, 24 nt, Artificial Sequence
  CEP290-633 targeting domain (RNA)
cacgaaaaucagauuucaugugug

SEQ ID NO: 1443 - RNA, 22 nt, Artificial Sequence
  Targeting domain
cgaaaaucagauuucaugugug

SEQ ID NO: 1444 - RNA, 23 nt, Artificial Sequence
  Targeting domain
ccacaagaaugaucauucuaaac

SEQ ID NO: 1445 - RNA, 22 nt, Artificial Sequence
  Targeting domain
cacaagaaugaucauucuaaac

SEQ ID NO: 1446 - skipped

SEQ ID NO: 1447 - RNA, 21 nt, Artificial Sequence
  Targeting domain
cggggagucacaugggaguca

SEQ ID NO: 1448 - RNA, 21 nt, Artificial Sequence
  Targeting domain
cuuuugacaguuuuuaaggcg

SEQ ID NO: 1449 - RNA, 18 nt, Artificial Sequence
  Targeting domain
cauucuuguggcaguaag

SEQ ID NO: 1450 - RNA, 24 nt, Artificial Sequence
  CEP290-641 targeting domain (RNA)
caucuagagcaagagaugaacuag

SEQ ID NO: 1451 - RNA, 21 nt, Artificial Sequence
  CEP290-642 targeting domain (RNA)
cuagagcaagagaugaacuag

SEQ ID NO: 1452 - RNA, 19 nt, Artificial Sequence
  CEP290-643 targeting domain (RNA)
ccugaacaaguuuugaaac

SEQ ID NO: 1453 - RNA, 18 nt, Artificial Sequence
  CEP290-644 targeting domain (RNA)
cugaacaaguuuugaaac

SEQ ID NO: 1454 - RNA, 23 nt, Artificial Sequence
  CEP290-645 targeting domain (RNA)
cucucuuccaguuguuuugcuca

SEQ ID NO: 1455 - RNA, 21 nt, Artificial Sequence
  Targeting domain
cucuuccaguuguuuugcuca

SEQ ID NO: 1456 - RNA, 19 nt, Artificial Sequence
  Targeting domain
cuuccaguuguuuugcuca

SEQ ID NO: 1457 - RNA, 18 nt, Artificial Sequence
  Targeting domain
cacaugggagucacaggg

SEQ ID NO: 1458 - RNA, 18 nt, Artificial Sequence
  Targeting domain
cauaucugucuuccuuaa

SEQ ID NO: 1459 - skipped

SEQ ID NO: 1460 - RNA, 22 nt, Artificial Sequence
  CEP290-651 targeting domain (RNA)
cuauuuaauuuguuucugugug

SEQ ID NO: 1461 - RNA, 23 nt, Artificial Sequence
  CEP290-652 targeting domain (RNA)
ugucaaaagcuaccgguuaccug

SEQ ID NO: 1462 - RNA, 21 nt, Artificial Sequence
  CEP290-653 targeting domain (RNA)
ucaaaagcuaccgguuaccug

SEQ ID NO: 1463 - RNA, 22 nt, Artificial Sequence
  Targeting domain
uuuuuaaggcggggagucacau

SEQ ID NO: 1464 - RNA, 21 nt, Artificial Sequence
  Targeting domain
uuuuaaggcggggagucacau

SEQ ID NO: 1465 - skipped

SEQ ID NO: 1466 - RNA, 19 nt, Artificial Sequence
  Targeting domain
uuaaggcggggagucacau

SEQ ID NO: 1467 - RNA, 18 nt, Artificial Sequence
  Targeting domain
uaaggcggggagucacau

SEQ ID NO: 1468 - RNA, 23 nt, Artificial Sequence
  CEP290-659 targeting domain (RNA)
ucuuacauccuccuuacugccac

SEQ ID NO: 1469 - RNA, 21 nt, Artificial Sequence
  Targeting domain
uuacauccuccuuacugccac

SEQ ID NO: 1470 - skipped

SEQ ID NO: 1471 - RNA, 21 nt, Artificial Sequence
  CEP290-662 targeting domain (RNA)
ucacaggguaggauucauguu

SEQ ID NO: 1472 - RNA, 23 nt, Artificial Sequence
  CEP290-663 targeting domain (RNA)
uaagaugcagaacuaguguagac

SEQ ID NO: 1473 - RNA, 18 nt, Artificial Sequence
  CEP290-664 targeting domain (RNA)
ugcagaacuaguguagac

SEQ ID NO: 1474 - RNA, 23 nt, Artificial Sequence
  CEP290-665 targeting domain (RNA)
uguugaguaucuccuguuuggca

SEQ ID NO: 1475 - RNA, 21 nt, Artificial Sequence
  CEP290-666 targeting domain (RNA)
uugaguaucuccuguuuggca

SEQ ID NO: 1476 - skipped

SEQ ID NO: 1477 - RNA, 24 nt, Artificial Sequence
  CEP290-668 targeting domain (RNA)
uagcuuuugacaguuuuuaaggcg

SEQ ID NO: 1478 - skipped

SEQ ID NO: 1479 - RNA, 19 nt, Artificial Sequence
  CEP290-670 targeting domain (RNA)
uuugacaguuuuuaaggcg

SEQ ID NO: 1480 - RNA, 18 nt, Artificial Sequence
  CEP290-671 targeting domain (RNA)
uugacaguuuuuaaggcg

SEQ ID NO: 1481 - RNA, 22 nt, Artificial Sequence
  CEP290-672 targeting domain (RNA)
ugaucauucuuguggcaguaag

SEQ ID NO: 1482 - RNA, 19 nt, Artificial Sequence
  CEP290-673 targeting domain (RNA)
ucauucuuguggcaguaag

SEQ ID NO: 1483 - RNA, 22 nt, Artificial Sequence
  CEP290-674 targeting domain (RNA)
ucuagagcaagagaugaacuag

SEQ ID NO: 1484 - skipped

SEQ ID NO: 1485 - RNA, 24 nt, Artificial Sequence
  CEP290-676 targeting domain (RNA)
uaaugccugaacaaguuuugaaac

SEQ ID NO: 1486 - RNA, 21 nt, Artificial Sequence
  CEP290-677 targeting domain (RNA)
ugccugaacaaguuuugaaac

SEQ ID NO: 1487 - RNA, 24 nt, Artificial Sequence
  CEP290-678 targeting domain (RNA)
uguagauugagguagaaucaagaa

SEQ ID NO: 1488 - RNA, 22 nt, Artificial Sequence
  CEP290-679 targeting domain (RNA)
uagauugagguagaaucaagaa

SEQ ID NO: 1489 - RNA, 18 nt, Artificial Sequence
  CEP290-680 targeting domain (RNA)
uugagguagaaucaagaa

SEQ ID NO: 1490 - RNA, 21 nt, Artificial Sequence
  CEP290-681 targeting domain (RNA)
uguaagacuggagauagagac

SEQ ID NO: 1491 - RNA, 19 nt, Artificial Sequence
  CEP290-682 targeting domain (RNA)
uaagacuggagauagagac

SEQ ID NO: 1492 - RNA, 24 nt, Artificial Sequence
  CEP290-683 targeting domain (RNA)
ucucucuuccaguuguuuugcuca

SEQ ID NO: 1493 - RNA, 22 nt, Artificial Sequence
  CEP290-684 targeting domain (RNA)
ucucuuccaguuguuuugcuca

SEQ ID NO: 1494 - skipped

SEQ ID NO: 1495 - RNA, 18 nt, Artificial Sequence
  CEP290-686 targeting domain (RNA)
uuccaguuguuuugcuca

SEQ ID NO: 1496 - RNA, 19 nt, Artificial Sequence
  CEP290-687 targeting domain (RNA)
ucacaugggagucacaggg

SEQ ID NO: 1497 - RNA, 24 nt, Artificial Sequence
  CEP290-688 targeting domain (RNA)
uguuuacauaucugucuuccuuaa

SEQ ID NO: 1498 - RNA, 22 nt, Artificial Sequence
  CEP290-689 targeting domain (RNA)
uuuacauaucugucuuccuuaa

SEQ ID NO: 1499 - RNA, 21 nt, Artificial Sequence
  CEP290-690 targeting domain (RNA)
uuacauaucugucuuccuuaa

SEQ ID NO: 1500 - skipped

SEQ ID NO: 1501 - RNA, 21 nt, Artificial Sequence
  Targeting domain
ucagauuucaugugugaagaa

SEQ ID NO: 1502 - skipped

SEQ ID NO: 1503 - RNA, 21 nt, Artificial Sequence
  CEP290-694 targeting domain (RNA)
uauuuaauuuguuucugugug

SEQ ID NO: 1504 - RNA, 19 nt, Artificial Sequence
  CEP290-695 targeting domain (RNA)
uuuaauuuguuucugugug

SEQ ID NO: 1505 - RNA, 18 nt, Artificial Sequence
  CEP290-696 targeting domain (RNA)
uuaauuuguuucugugug

SEQ ID NO: 1506 - RNA, 21 nt, Artificial Sequence
  CEP290-697 targeting domain (RNA)
guagaauaaauuuauuuaaug

SEQ ID NO: 1507 - RNA, 18 nt, Artificial Sequence
  CEP290-495 targeting domain (RNA)
gaauaaauuuauuuaaug

SEQ ID NO: 1508 - RNA, 23 nt, Artificial Sequence
  CEP290-698 targeting domain (RNA)
gagaaaaaggagcaugaaacagg

SEQ ID NO: 1509 - RNA, 21 nt, Artificial Sequence
  CEP290-699 targeting domain (RNA)
gaaaaaggagcaugaaacagg

SEQ ID NO: 1510 - RNA, 22 nt, Artificial Sequence
  CEP290-700 targeting domain (RNA)
guagaauaaaaaauaaaaaaac

SEQ ID NO: 1511 - RNA, 19 nt, Artificial Sequence
  CEP290-701 targeting domain (RNA)
gaauaaaaaauaaaaaaac

SEQ ID NO: 1512 - RNA, 24 nt, Artificial Sequence
  CEP290-702 targeting domain (RNA)
gaauaaaaaauaaaaaaacuagag

SEQ ID NO: 1513 - RNA, 20 nt, Artificial Sequence
  CEP290-508 targeting domain (RNA)
gaaauagauguagauugagg

SEQ ID NO: 1514 - RNA, 21 nt, Artificial Sequence
  CEP290-703 targeting domain (RNA)
gauaauaaggaaauacaaaaa

SEQ ID NO: 1515 - RNA, 23 nt, Artificial Sequence
  CEP290-704 targeting domain (RNA)
guguugcccaggcuggagugcag

SEQ ID NO: 1516 - RNA, 21 nt, Artificial Sequence
  CEP290-705 targeting domain (RNA)
guugcccaggcuggagugcag

SEQ ID NO: 1517 - RNA, 18 nt, Artificial Sequence
  CEP290-706 targeting domain (RNA)
gcccaggcuggagugcag

SEQ ID NO: 1518 - RNA, 19 nt, Artificial Sequence
  CEP290-707 targeting domain (RNA)
guuguuuuuuuuuuugaaa

SEQ ID NO: 1519 - RNA, 23 nt, Artificial Sequence
  CEP290-708 targeting domain (RNA)
gagucucacuguguugcccaggc

SEQ ID NO: 1520 - RNA, 21 nt, Artificial Sequence
  CEP290-709 targeting domain (RNA)
gucucacuguguugcccaggc

SEQ ID NO: 1521 - RNA, 24 nt, Artificial Sequence
  CEP290-710 targeting domain (RNA)
aauguagaauaaauuuauuuaaug

SEQ ID NO: 1522 - RNA, 23 nt, Artificial Sequence
  CEP290-711 targeting domain (RNA)
auguagaauaaauuuauuuaaug

SEQ ID NO: 1523 - RNA, 19 nt, Artificial Sequence
  CEP290-712 targeting domain (RNA)
agaauaaauuuauuuaaug

SEQ ID NO: 1524 - RNA, 24 nt, Artificial Sequence
  CEP290-713 targeting domain (RNA)
auuuauucuacaauaaaaaaugau

SEQ ID NO: 1525 - RNA, 20 nt, Artificial Sequence
  Targeting domain
auucuacaauaaaaaaugau

SEQ ID NO: 1526 - RNA, 24 nt, Artificial Sequence
  CEP290-715 targeting domain (RNA)
agagaaaaaggagcaugaaacagg

SEQ ID NO: 1527 - RNA, 22 nt, Artificial Sequence
  CEP290-716 targeting domain (RNA)
agaaaaaggagcaugaaacagg

SEQ ID NO: 1528 - RNA, 20 nt, Artificial Sequence
  Targeting domain
aaaaaggagcaugaaacagg

SEQ ID NO: 1529 - RNA, 19 nt, Artificial Sequence
  Targeting domain
aaaaggagcaugaaacagg

SEQ ID NO: 1530 - RNA, 18 nt, Artificial Sequence
  Targeting domain
aaaggagcaugaaacagg

SEQ ID NO: 1531 - RNA, 24 nt, Artificial Sequence
  CEP290-720 targeting domain (RNA)
acaauaaaaaaugaugagaauuua

SEQ ID NO: 1532 - RNA, 22 nt, Artificial Sequence
  Targeting domain
aauaaaaaaugaugagaauuua

SEQ ID NO: 1533 - RNA, 21 nt, Artificial Sequence
  Targeting domain
auaaaaaaugaugagaauuua

SEQ ID NO: 1534 - RNA, 19 nt, Artificial Sequence
  Targeting domain
aaaaaaugaugagaauuua

SEQ ID NO: 1535 - RNA, 18 nt, Artificial Sequence
  Targeting domain
aaaaaugaugagaauuua

SEQ ID NO: 1536 - RNA, 24 nt, Artificial Sequence
  Targeting domain
auguagaauaaaaaauaaaaaaac

SEQ ID NO: 1537 - RNA, 20 nt, Artificial Sequence
  Targeting domain
agaauaaaaaauaaaaaaac

SEQ ID NO: 1538 - RNA, 18 nt, Artificial Sequence
  Targeting domain
aauaaaaaauaaaaaaac

SEQ ID NO: 1539 - RNA, 23 nt, Artificial Sequence
  CEP290-728 targeting domain (RNA)
aauaaaaaauaaaaaaacuagag

SEQ ID NO: 1540 - RNA, 22 nt, Artificial Sequence
  Targeting domain
auaaaaaauaaaaaaacuagag

SEQ ID NO: 1541 - RNA, 20 nt, Artificial Sequence
  Targeting domain
aaaaaauaaaaaaacuagag

SEQ ID NO: 1542 - RNA, 19 nt, Artificial Sequence
  Targeting domain
aaaaauaaaaaaacuagag

SEQ ID NO: 1543 - RNA, 18 nt, Artificial Sequence
  Targeting domain
aaaauaaaaaaacuagag

SEQ ID NO: 1544 - RNA, 23 nt, Artificial Sequence
  Targeting domain
caauaaaaaaugaugagaauuua

SEQ ID NO: 1545 - RNA, 22 nt, Artificial Sequence
  Targeting domain
uguagaauaaauuuauuuaaug

SEQ ID NO: 1546 - RNA, 20 nt, Artificial Sequence
  Targeting domain
uagaauaaauuuauuuaaug

SEQ ID NO: 1547 - RNA, 23 nt, Artificial Sequence
  Targeting domain
uuuauucuacaauaaaaaaugau

SEQ ID NO: 1548 - RNA, 22 nt, Artificial Sequence
  Targeting domain
uuauucuacaauaaaaaaugau

SEQ ID NO: 1549 - RNA, 21 nt, Artificial Sequence
  Targeting domain
uauucuacaauaaaaaaugau

SEQ ID NO: 1550 - RNA, 19 nt, Artificial Sequence
  Targeting domain
uucuacaauaaaaaaugau

SEQ ID NO: 1551 - RNA, 18 nt, Artificial Sequence
  Targeting domain
ucuacaauaaaaaaugau

SEQ ID NO: 1552 - RNA, 20 nt, Artificial Sequence
  Targeting domain
uaaaaaaugaugagaauuua

SEQ ID NO: 1553 - RNA, 23 nt, Artificial Sequence
  Targeting domain
uguagaauaaaaaauaaaaaaac

SEQ ID NO: 1554 - RNA, 21 nt, Artificial Sequence
  Targeting domain
uagaauaaaaaauaaaaaaac

SEQ ID NO: 1555 - RNA, 21 nt, Artificial Sequence
  Targeting domain
uaaaaaauaaaaaaacuagag

SEQ ID NO: 1556 - RNA, 24 nt, Artificial Sequence
  Targeting domain
aaaagaaauagauguagauugagg

SEQ ID NO: 1557 - RNA, 23 nt, Artificial Sequence
  Targeting domain
aaagaaauagauguagauugagg

SEQ ID NO: 1558 - RNA, 22 nt, Artificial Sequence
  Targeting domain
aagaaauagauguagauugagg

SEQ ID NO: 1559 - RNA, 21 nt, Artificial Sequence
  Targeting domain
agaaauagauguagauugagg

SEQ ID NO: 1560 - RNA, 19 nt, Artificial Sequence
  Targeting domain
aaauagauguagauugagg

SEQ ID NO: 1561 - RNA, 18 nt, Artificial Sequence
  Targeting domain
aauagauguagauugagg

SEQ ID NO: 1562 - RNA, 24 nt, Artificial Sequence
  Targeting domain
auaauaaggaaauacaaaaacugg

SEQ ID NO: 1563 - RNA, 22 nt, Artificial Sequence
  Targeting domain
aauaaggaaauacaaaaacugg

SEQ ID NO: 1564 - RNA, 21 nt, Artificial Sequence
  Targeting domain
auaaggaaauacaaaaacugg

SEQ ID NO: 1565 - RNA, 19 nt, Artificial Sequence
  Targeting domain
aaggaaauacaaaaacugg

SEQ ID NO: 1566 - RNA, 18 nt, Artificial Sequence
  Targeting domain
aggaaauacaaaaacugg

SEQ ID NO: 1567 - RNA, 24 nt, Artificial Sequence
  Targeting domain
auagauaauaaggaaauacaaaaa

SEQ ID NO: 1568 - RNA, 22 nt, Artificial Sequence
  Targeting domain
agauaauaaggaaauacaaaaa

SEQ ID NO: 1569 - RNA, 20 nt, Artificial Sequence
  Targeting domain
auaauaaggaaauacaaaaa

SEQ ID NO: 1570 - RNA, 18 nt, Artificial Sequence
  Targeting domain
aauaaggaaauacaaaaa

SEQ ID NO: 1571 - RNA, 20 nt, Artificial Sequence
  Targeting domain
aaaaaaaaaaacaacaaaaa

SEQ ID NO: 1572 - RNA, 19 nt, Artificial Sequence
  Targeting domain
aaaaaaaaaacaacaaaaa

SEQ ID NO: 1573 - RNA, 18 nt, Artificial Sequence
  Targeting domain
aaaaaaaaacaacaaaaa

SEQ ID NO: 1574 - RNA, 24 nt, Artificial Sequence
  Targeting domain
agagucucacuguguugcccaggc

SEQ ID NO: 1575 - RNA, 22 nt, Artificial Sequence
  Targeting domain
agucucacuguguugcccaggc

SEQ ID NO: 1576 - RNA, 21 nt, Artificial Sequence
  Targeting domain
caaaaaaaaaaacaacaaaaa

SEQ ID NO: 1577 - RNA, 19 nt, Artificial Sequence
  Targeting domain
cucacuguguugcccaggc

SEQ ID NO: 1578 - RNA, 23 nt, Artificial Sequence
  Targeting domain
uaauaaggaaauacaaaaacugg

SEQ ID NO: 1579 - RNA, 20 nt, Artificial Sequence
  Targeting domain
uaaggaaauacaaaaacugg

SEQ ID NO: 1580 - RNA, 23 nt, Artificial Sequence
  CEP290-769 targeting domain (RNA)
uagauaauaaggaaauacaaaaa

SEQ ID NO: 1581 - RNA, 19 nt, Artificial Sequence
  Targeting domain
uaauaaggaaauacaaaaa

SEQ ID NO: 1582 - RNA, 24 nt, Artificial Sequence
  Targeting domain
uguguugcccaggcuggagugcag

SEQ ID NO: 1583 - RNA, 22 nt, Artificial Sequence
  CEP290-772 targeting domain (RNA)
uguugcccaggcuggagugcag

SEQ ID NO: 1584 - skipped

SEQ ID NO: 1585 - RNA, 19 nt, Artificial Sequence
  Targeting domain
ugcccaggcuggagugcag

SEQ ID NO: 1586 - RNA, 24 nt, Artificial Sequence
  Targeting domain
uuucaaaaaaaaaaacaacaaaaa

SEQ ID NO: 1587 - RNA, 23 nt, Artificial Sequence
  Targeting domain
uucaaaaaaaaaaacaacaaaaa

SEQ ID NO: 1588 - RNA, 22 nt, Artificial Sequence
  Targeting domain
ucaaaaaaaaaaacaacaaaaa

SEQ ID NO: 1589 - RNA, 24 nt, Artificial Sequence
  Targeting domain
uuuuuguuguuuuuuuuuuugaaa

SEQ ID NO: 1590 - RNA, 23 nt, Artificial Sequence
  Targeting domain
uuuuguuguuuuuuuuuuugaaa

SEQ ID NO: 1591 - RNA, 22 nt, Artificial Sequence
  Targeting domain
uuuguuguuuuuuuuuuugaaa

SEQ ID NO: 1592 - RNA, 21 nt, Artificial Sequence
  Targeting domain
uuguuguuuuuuuuuuugaaa

SEQ ID NO: 1593 - RNA, 20 nt, Artificial Sequence
  Targeting domain
uguuguuuuuuuuuuugaaa

SEQ ID NO: 1594 - RNA, 18 nt, Artificial Sequence
  Targeting domain
uuguuuuuuuuuuugaaa

SEQ ID NO: 1595 - skipped

SEQ ID NO: 1596 - RNA, 18 nt, Artificial Sequence
  CEP290-785 targeting domain (RNA)
ucacuguguugcccaggc

SEQ ID NO: 1597 - RNA, 21 nt, Artificial Sequence
  CEP290-786 targeting domain (RNA)
acuguuggcuacauccauucc

SEQ ID NO: 1598 - RNA, 24 nt, Artificial Sequence
  CEP290-787 targeting domain (RNA)
aauuuacagagugcauccaugguc

SEQ ID NO: 1599 - RNA, 23 nt, Artificial Sequence
  CEP290-788 targeting domain (RNA)
auuuacagagugcauccaugguc

SEQ ID NO: 1600 - RNA, 19 nt, Artificial Sequence
  CEP290-789 targeting domain (RNA)
acagagugcauccaugguc

SEQ ID NO: 1601 - skipped

SEQ ID NO: 1602 - RNA, 21 nt, Artificial Sequence
  Targeting domain
auggucccuggcuuuuguucc

SEQ ID NO: 1603 - RNA, 19 nt, Artificial Sequence
  Targeting domain
auagagacacauucaguaa

SEQ ID NO: 1604 - RNA, 24 nt, Artificial Sequence
  Targeting domain
agcucaaaagcuuuugcuggcuca

SEQ ID NO: 1605 - RNA, 19 nt, Artificial Sequence
  Targeting domain
aaaagcuuuugcuggcuca

SEQ ID NO: 1606 - RNA, 18 nt, Artificial Sequence
  Targeting domain
aaagcuuuugcuggcuca

SEQ ID NO: 1607 - RNA, 24 nt, Artificial Sequence
  Targeting domain
aauccauaagccucuauuucugau

SEQ ID NO: 1608 - RNA, 23 nt, Artificial Sequence
  Targeting domain
auccauaagccucuauuucugau

SEQ ID NO: 1609 - RNA, 19 nt, Artificial Sequence
  Targeting domain
auaagccucuauuucugau

SEQ ID NO: 1610 - RNA, 23 nt, Artificial Sequence
  Targeting domain
agcuaaaucaugcaagugaccua

SEQ ID NO: 1611 - RNA, 19 nt, Artificial Sequence
  Targeting domain
aaaucaugcaagugaccua

SEQ ID NO: 1612 - RNA, 18 nt, Artificial Sequence
  Targeting domain
aaucaugcaagugaccua

SEQ ID NO: 1613 - RNA, 23 nt, Artificial Sequence
  Targeting domain
aaaccucuuuuaaccagacaucu

SEQ ID NO: 1614 - RNA, 22 nt, Artificial Sequence
  Targeting domain
aaccucuuuuaaccagacaucu

SEQ ID NO: 1615 - RNA, 21 nt, Artificial Sequence
  Targeting domain
accucuuuuaaccagacaucu

SEQ ID NO: 1616 - RNA, 24 nt, Artificial Sequence
  Targeting domain
aguuuguucuggguacagggguaa

SEQ ID NO: 1617 - RNA, 24 nt, Artificial Sequence
  Targeting domain
augacucauaauuuaguaggaauc

SEQ ID NO: 1618 - RNA, 21 nt, Artificial Sequence
  Targeting domain
acucauaauuuaguaggaauc

SEQ ID NO: 1619 - RNA, 21 nt, Artificial Sequence
  Targeting domain
aauggauguagccaacaguag

SEQ ID NO: 1620 - RNA, 20 nt, Artificial Sequence
  Targeting domain
auggauguagccaacaguag

SEQ ID NO: 1621 - RNA, 24 nt, Artificial Sequence
  Targeting domain
aucaccucucuuuggcaaaagcag

SEQ ID NO: 1622 - RNA, 21 nt, Artificial Sequence
  Targeting domain
accucucuuuggcaaaagcag

SEQ ID NO: 1623 - RNA, 23 nt, Artificial Sequence
  Targeting domain
agguagaauauuguaaucaaagg

SEQ ID NO: 1624 - RNA, 19 nt, Artificial Sequence
  Targeting domain
agaauauuguaaucaaagg

SEQ ID NO: 1625 - RNA, 21 nt, Artificial Sequence
  Targeting domain
aaggaacaaaagccagggacc

SEQ ID NO: 1626 - RNA, 20 nt, Artificial Sequence
  Targeting domain
aggaacaaaagccagggacc

SEQ ID NO: 1627 - RNA, 24 nt, Artificial Sequence
  Targeting domain
acauccauuccaaggaacaaaagc

SEQ ID NO: 1628 - RNA, 22 nt, Artificial Sequence
  Targeting domain
auccauuccaaggaacaaaagc

SEQ ID NO: 1629 - RNA, 18 nt, Artificial Sequence
  Targeting domain
auuccaaggaacaaaagc

SEQ ID NO: 1630 - RNA, 24 nt, Artificial Sequence
  Targeting domain
agaauuagaucuuauucuacuccu

SEQ ID NO: 1631 - RNA, 22 nt, Artificial Sequence
  Targeting domain
aauuagaucuuauucuacuccu

SEQ ID NO: 1632 - RNA, 21 nt, Artificial Sequence
  Targeting domain
auuagaucuuauucuacuccu

SEQ ID NO: 1633 - RNA, 18 nt, Artificial Sequence
  Targeting domain
agaucuuauucuacuccu

SEQ ID NO: 1634 - RNA, 19 nt, Artificial Sequence
  Targeting domain
auuuguucaucuuccucau

SEQ ID NO: 1635 - RNA, 23 nt, Artificial Sequence
  Targeting domain
agaggugauuauguuacuuuuua

SEQ ID NO: 1636 - RNA, 21 nt, Artificial Sequence
  Targeting domain
aggugauuauguuacuuuuua

SEQ ID NO: 1637 - RNA, 24 nt, Artificial Sequence
  Targeting domain
aaccucuuuuaaccagacaucuaa

SEQ ID NO: 1638 - RNA, 23 nt, Artificial Sequence
  Targeting domain
accucuuuuaaccagacaucuaa

SEQ ID NO: 1639 - RNA, 22 nt, Artificial Sequence
  Targeting domain
auaaacaugacucauaauuuag

SEQ ID NO: 1640 - skipped

SEQ ID NO: 1641 - RNA, 19 nt, Artificial Sequence
  Targeting domain
aacaugacucauaauuuag

SEQ ID NO: 1642 - RNA, 18 nt, Artificial Sequence
  Targeting domain
acaugacucauaauuuag

SEQ ID NO: 1643 - RNA, 24 nt, Artificial Sequence
  Targeting domain
acagguagaauauuguaaucaaag

SEQ ID NO: 1644 - RNA, 22 nt, Artificial Sequence
  Targeting domain
agguagaauauuguaaucaaag

SEQ ID NO: 1645 - RNA, 18 nt, Artificial Sequence
  Targeting domain
agaauauuguaaucaaag

SEQ ID NO: 1646 - RNA, 24 nt, Artificial Sequence
  Targeting domain
auaguuuguucuggguacaggggu

SEQ ID NO: 1647 - RNA, 22 nt, Artificial Sequence
  Targeting domain
aguuuguucuggguacaggggu

SEQ ID NO: 1648 - RNA, 23 nt, Artificial Sequence
  Targeting domain
agacaucuaagagaaaaaggagc

SEQ ID NO: 1649 - RNA, 21 nt, Artificial Sequence
  Targeting domain
acaucuaagagaaaaaggagc

SEQ ID NO: 1650 - RNA, 19 nt, Artificial Sequence
  Targeting domain
aucuaagagaaaaaggagc

SEQ ID NO: 1651 - skipped

SEQ ID NO: 1652 - RNA, 18 nt, Artificial Sequence
  Targeting domain
aggauaggacagaggaca

SEQ ID NO: 1653 - RNA, 22 nt, Artificial Sequence
  Targeting domain
aggaaagaugaaaaauacucuu

SEQ ID NO: 1654 - RNA, 19 nt, Artificial Sequence
  Targeting domain
aaagaugaaaaauacucuu

SEQ ID NO: 1655 - RNA, 18 nt, Artificial Sequence
  Targeting domain
aagaugaaaaauacucuu

SEQ ID NO: 1656 - RNA, 23 nt, Artificial Sequence
  Targeting domain
aggaaagaugaaaaauacucuuu

SEQ ID NO: 1657 - skipped

SEQ ID NO: 1658 - RNA, 19 nt, Artificial Sequence
  Targeting domain
aagaugaaaaauacucuuu

SEQ ID NO: 1659 - RNA, 18 nt, Artificial Sequence
  Targeting domain
agaugaaaaauacucuuu

SEQ ID NO: 1660 - RNA, 21 nt, Artificial Sequence
  Targeting domain
aggaaagaugaaaaauacucu

SEQ ID NO: 1661 - RNA, 18 nt, Artificial Sequence
  Targeting domain
aaagaugaaaaauacucu

SEQ ID NO: 1662 - RNA, 22 nt, Artificial Sequence
  Targeting domain
auaggacagaggacauggagaa

SEQ ID NO: 1663 - skipped

SEQ ID NO: 1664 - RNA, 24 nt, Artificial Sequence
  Targeting domain
aggauaggacagaggacauggaga

SEQ ID NO: 1665 - RNA, 21 nt, Artificial Sequence
  Targeting domain
auaggacagaggacauggaga

SEQ ID NO: 1666 - RNA, 19 nt, Artificial Sequence
  Targeting domain
aggacagaggacauggaga

SEQ ID NO: 1667 - RNA, 23 nt, Artificial Sequence
  Targeting domain
aaggaacaaaagccagggaccau

SEQ ID NO: 1668 - RNA, 22 nt, Artificial Sequence
  Targeting domain
aggaacaaaagccagggaccau

SEQ ID NO: 1669 - RNA, 19 nt, Artificial Sequence
  Targeting domain
aacaaaagccagggaccau

SEQ ID NO: 1670 - RNA, 18 nt, Artificial Sequence
  Targeting domain
acaaaagccagggaccau

SEQ ID NO: 1671 - RNA, 24 nt, Artificial Sequence
  Targeting domain
acauuuauucuacaauaaaaaaug

SEQ ID NO: 1672 - RNA, 22 nt, Artificial Sequence
  Targeting domain
auuuauucuacaauaaaaaaug

SEQ ID NO: 1673 - RNA, 18 nt, Artificial Sequence
  Targeting domain
auucuacaauaaaaaaug

SEQ ID NO: 1674 - RNA, 24 nt, Artificial Sequence
  Targeting domain
auuguguguguguguguguguuau

SEQ ID NO: 1675 - RNA, 23 nt, Artificial Sequence
  Targeting domain
cuacuguuggcuacauccauucc

SEQ ID NO: 1676 - RNA, 20 nt, Artificial Sequence
  Targeting domain
cuguuggcuacauccauucc

SEQ ID NO: 1677 - RNA, 18 nt, Artificial Sequence
  Targeting domain
cagagugcauccaugguc

SEQ ID NO: 1678 - RNA, 24 nt, Artificial Sequence
  Targeting domain
cuccagcauuagaaaguccuaggc

SEQ ID NO: 1679 - RNA, 22 nt, Artificial Sequence
  Targeting domain
ccagcauuagaaaguccuaggc

SEQ ID NO: 1680 - RNA, 21 nt, Artificial Sequence
  Targeting domain
cagcauuagaaaguccuaggc

SEQ ID NO: 1681 - RNA, 18 nt, Artificial Sequence
  Targeting domain
cauuagaaaguccuaggc

SEQ ID NO: 1682 - RNA, 24 nt, Artificial Sequence
  Targeting domain
cccauggucccuggcuuuuguucc

SEQ ID NO: 1683 - RNA, 23 nt, Artificial Sequence
  Targeting domain
ccauggucccuggcuuuuguucc

SEQ ID NO: 1684 - RNA, 22 nt, Artificial Sequence
  Targeting domain
cauggucccuggcuuuuguucc

SEQ ID NO: 1685 - RNA, 22 nt, Artificial Sequence
  Targeting domain
cucauagagacacauucaguaa

SEQ ID NO: 1686 - skipped

SEQ ID NO: 1687 - RNA, 22 nt, Artificial Sequence
  Targeting domain
cucaaaagcuuuugcuggcuca

SEQ ID NO: 1688 - skipped

SEQ ID NO: 1689 - RNA, 21 nt, Artificial Sequence
  Targeting domain
ccauaagccucuauuucugau

SEQ ID NO: 1690 - skipped

SEQ ID NO: 1691 - RNA, 24 nt, Artificial Sequence
  Targeting domain
cagcuaaaucaugcaagugaccua

SEQ ID NO: 1692 - RNA, 21 nt, Artificial Sequence
  Targeting domain
cuaaaucaugcaagugaccua

SEQ ID NO: 1693 - RNA, 24 nt, Artificial Sequence
  Targeting domain
caaaccucuuuuaaccagacaucu

SEQ ID NO: 1694 - RNA, 20 nt, Artificial Sequence
  Targeting domain
ccucuuuuaaccagacaucu

SEQ ID NO: 1695 - RNA, 19 nt, Artificial Sequence
  Targeting domain
cucuuuuaaccagacaucu

SEQ ID NO: 1696 - skipped

SEQ ID NO: 1697 - RNA, 18 nt, Artificial Sequence
  Targeting domain
cauaauuuaguaggaauc

SEQ ID NO: 1698 - RNA, 22 nt, Artificial Sequence
  Targeting domain
caccucucuuuggcaaaagcag

SEQ ID NO: 1699 - skipped

SEQ ID NO: 1700 - RNA, 19 nt, Artificial Sequence
  Targeting domain
cucucuuuggcaaaagcag

SEQ ID NO: 1701 - RNA, 24 nt, Artificial Sequence
  Targeting domain
cagguagaauauuguaaucaaagg

SEQ ID NO: 1702 - RNA, 23 nt, Artificial Sequence
  Targeting domain
ccaaggaacaaaagccagggacc

SEQ ID NO: 1703 - RNA, 22 nt, Artificial Sequence
  Targeting domain
caaggaacaaaagccagggacc

SEQ ID NO: 1704 - RNA, 23 nt, Artificial Sequence
  Targeting domain
cauccauuccaaggaacaaaagc

SEQ ID NO: 1705 - RNA, 20 nt, Artificial Sequence
  Targeting domain
ccauuccaaggaacaaaagc

SEQ ID NO: 1706 - RNA, 19 nt, Artificial Sequence
  Targeting domain
cauuccaaggaacaaaagc

SEQ ID NO: 1707 - RNA, 24 nt, Artificial Sequence
  Targeting domain
cucuugccuaggacuuucuaaugc

SEQ ID NO: 1708 - RNA, 22 nt, Artificial Sequence
  Targeting domain
cuugccuaggacuuucuaaugc

SEQ ID NO: 1709 - RNA, 18 nt, Artificial Sequence
  Targeting domain
ccuaggacuuucuaaugc

SEQ ID NO: 1710 - RNA, 23 nt, Artificial Sequence
  Targeting domain
ccugauuuguucaucuuccucau

SEQ ID NO: 1711 - RNA, 22 nt, Artificial Sequence
  Targeting domain
cugauuuguucaucuuccucau

SEQ ID NO: 1712 - RNA, 22 nt, Artificial Sequence
  Targeting domain
ccucuuuuaaccagacaucuaa

SEQ ID NO: 1713 - RNA, 21 nt, Artificial Sequence
  Targeting domain
cucuuuuaaccagacaucuaa

SEQ ID NO: 1714 - RNA, 19 nt, Artificial Sequence
  Targeting domain
cuuuuaaccagacaucuaa

SEQ ID NO: 1715 - RNA, 24 nt, Artificial Sequence
  Targeting domain
ccucuguccuauccucuccagcau

SEQ ID NO: 1716 - RNA, 23 nt, Artificial Sequence
  Targeting domain
cucuguccuauccucuccagcau

SEQ ID NO: 1717 - RNA, 21 nt, Artificial Sequence
  Targeting domain
cuguccuauccucuccagcau

SEQ ID NO: 1718 - RNA, 23 nt, Artificial Sequence
  Targeting domain
cagguagaauauuguaaucaaag

SEQ ID NO: 1719 - RNA, 20 nt, Artificial Sequence
  Targeting domain
cuggguacagggguaagaga

SEQ ID NO: 1720 - RNA, 19 nt, Artificial Sequence
  Targeting domain
cuuucugcugcuuuugcca

SEQ ID NO: 1721 - RNA, 24 nt, Artificial Sequence
  Targeting domain
cagacaucuaagagaaaaaggagc

SEQ ID NO: 1722 - RNA, 20 nt, Artificial Sequence
  Targeting domain
caucuaagagaaaaaggagc

SEQ ID NO: 1723 - RNA, 24 nt, Artificial Sequence
  Targeting domain
cuggagaggauaggacagaggaca

SEQ ID NO: 1724 - RNA, 24 nt, Artificial Sequence
  Targeting domain
caaggaacaaaagccagggaccau

SEQ ID NO: 1725 - RNA, 23 nt, Artificial Sequence
  Targeting domain
cauuuauucuacaauaaaaaaug

SEQ ID NO: 1726 - RNA, 24 nt, Artificial Sequence
  Targeting domain
gcuacuguuggcuacauccauucc

SEQ ID NO: 1727 - RNA, 18 nt, Artificial Sequence
  Targeting domain
guuggcuacauccauucc

SEQ ID NO: 1728 - RNA, 19 nt, Artificial Sequence
  Targeting domain
gcauuagaaaguccuaggc

SEQ ID NO: 1729 - RNA, 19 nt, Artificial Sequence
  Targeting domain
ggucccuggcuuuuguucc

SEQ ID NO: 1730 - RNA, 18 nt, Artificial Sequence
  Targeting domain
gucccuggcuuuuguucc

SEQ ID NO: 1731 - RNA, 24 nt, Artificial Sequence
  Targeting domain
ggcucauagagacacauucaguaa

SEQ ID NO: 1732 - RNA, 23 nt, Artificial Sequence
  Targeting domain
gcucauagagacacauucaguaa

SEQ ID NO: 1733 - RNA, 23 nt, Artificial Sequence
  Targeting domain
gcucaaaagcuuuugcuggcuca

SEQ ID NO: 1734 - RNA, 22 nt, Artificial Sequence
  Targeting domain
gcuaaaucaugcaagugaccua

SEQ ID NO: 1735 - RNA, 23 nt, Artificial Sequence
  Targeting domain
guuuguucuggguacagggguaa

SEQ ID NO: 1736 - RNA, 19 nt, Artificial Sequence
  Targeting domain
guucuggguacagggguaa

SEQ ID NO: 1737 - RNA, 22 nt, Artificial Sequence
  CEP290-312/-926 targeting domain (RNA)
gacucauaauuuaguaggaauc

SEQ ID NO: 1738 - RNA, 23 nt, Artificial Sequence
  Targeting domain
ggaauggauguagccaacaguag

SEQ ID NO: 1739 - RNA, 22 nt, Artificial Sequence
  Targeting domain
gaauggauguagccaacaguag

SEQ ID NO: 1740 - RNA, 18 nt, Artificial Sequence
  Targeting domain
ggauguagccaacaguag

SEQ ID NO: 1741 - RNA, 22 nt, Artificial Sequence
  Targeting domain
gguagaauauuguaaucaaagg

SEQ ID NO: 1742 - RNA, 21 nt, Artificial Sequence
  Targeting domain
guagaauauuguaaucaaagg

SEQ ID NO: 1743 - RNA, 18 nt, Artificial Sequence
  Targeting domain
gaauauuguaaucaaagg

SEQ ID NO: 1744 - RNA, 19 nt, Artificial Sequence
  Targeting domain
ggaacaaaagccagggacc

SEQ ID NO: 1745 - RNA, 18 nt, Artificial Sequence
  Targeting domain
gaacaaaagccagggacc

SEQ ID NO: 1746 - RNA, 23 nt, Artificial Sequence
  Targeting domain
gaauuagaucuuauucuacuccu

SEQ ID NO: 1747 - RNA, 19 nt, Artificial Sequence
  Targeting domain
gccuaggacuuucuaaugc

SEQ ID NO: 1748 - skipped

SEQ ID NO: 1749 - RNA, 24 nt, Artificial Sequence
  Targeting domain
gagaggugauuauguuacuuuuua

SEQ ID NO: 1750 - RNA, 22 nt, Artificial Sequence
  Targeting domain
gaggugauuauguuacuuuuua

SEQ ID NO: 1751 - skipped

SEQ ID NO: 1752 - RNA, 19 nt, Artificial Sequence
  Targeting domain
gugauuauguuacuuuuua

SEQ ID NO: 1753 - RNA, 19 nt, Artificial Sequence
  Targeting domain
guccuauccucuccagcau

SEQ ID NO: 1754 - RNA, 23 nt, Artificial Sequence
  Targeting domain
gauaaacaugacucauaauuuag

SEQ ID NO: 1755 - RNA, 21 nt, Artificial Sequence
  Targeting domain
gguagaauauuguaaucaaag

SEQ ID NO: 1756 - RNA, 20 nt, Artificial Sequence
  Targeting domain
guagaauauuguaaucaaag

SEQ ID NO: 1757 - RNA, 23 nt, Artificial Sequence
  Targeting domain
guucuggguacagggguaagaga

SEQ ID NO: 1758 - RNA, 18 nt, Artificial Sequence
  Targeting domain
ggguacagggguaagaga

SEQ ID NO: 1759 - RNA, 21 nt, Artificial Sequence
  Targeting domain
guuuguucuggguacaggggu

SEQ ID NO: 1760 - RNA, 24 nt, Artificial Sequence
  Targeting domain
guuugcuuucugcugcuuuugcca

SEQ ID NO: 1761 - skipped

SEQ ID NO: 1762 - RNA, 22 nt, Artificial Sequence
  Targeting domain
gacaucuaagagaaaaaggagc

SEQ ID NO: 1763 - RNA, 22 nt, Artificial Sequence
  Targeting domain
ggagaggauaggacagaggaca

SEQ ID NO: 1764 - RNA, 21 nt, Artificial Sequence
  Targeting domain
gagaggauaggacagaggaca

SEQ ID NO: 1765 - RNA, 19 nt, Artificial Sequence
  Targeting domain
gaggauaggacagaggaca

SEQ ID NO: 1766 - RNA, 21 nt, Artificial Sequence
  Targeting domain
ggaaagaugaaaaauacucuu

SEQ ID NO: 1767 - RNA, 22 nt, Artificial Sequence
  Targeting domain
ggaaagaugaaaaauacucuuu

SEQ ID NO: 1768 - RNA, 21 nt, Artificial Sequence
  Targeting domain
gaaagaugaaaaauacucuuu

SEQ ID NO: 1769 - skipped

SEQ ID NO: 1770 - RNA, 19 nt, Artificial Sequence
  Targeting domain
gaaagaugaaaaauacucu

SEQ ID NO: 1771 - RNA, 24 nt, Artificial Sequence
  Targeting domain
ggauaggacagaggacauggagaa

SEQ ID NO: 1772 - RNA, 23 nt, Artificial Sequence
  Targeting domain
gauaggacagaggacauggagaa

SEQ ID NO: 1773 - RNA, 19 nt, Artificial Sequence
  Targeting domain
ggacagaggacauggagaa

SEQ ID NO: 1774 - RNA, 18 nt, Artificial Sequence
  Targeting domain
gacagaggacauggagaa

SEQ ID NO: 1775 - RNA, 23 nt, Artificial Sequence
  Targeting domain
ggauaggacagaggacauggaga

SEQ ID NO: 1776 - RNA, 22 nt, Artificial Sequence
  Targeting domain
gauaggacagaggacauggaga

SEQ ID NO: 1777 - RNA, 18 nt, Artificial Sequence
  Targeting domain
ggacagaggacauggaga

SEQ ID NO: 1778 - RNA, 21 nt, Artificial Sequence
  Targeting domain
ggaacaaaagccagggaccau

SEQ ID NO: 1779 - RNA, 21 nt, Artificial Sequence
  Targeting domain
guguguguguguguguguuau

SEQ ID NO: 1780 - RNA, 19 nt, Artificial Sequence
  Targeting domain
guguguguguguguguuau

SEQ ID NO: 1781 - RNA, 22 nt, Artificial Sequence
  Targeting domain
guguguguguguguguguuaug

SEQ ID NO: 1782 - skipped

SEQ ID NO: 1783 - RNA, 18 nt, Artificial Sequence
  Targeting domain
guguguguguguguuaug

SEQ ID NO: 1784 - RNA, 22 nt, Artificial Sequence
  Targeting domain
uacuguuggcuacauccauucc

SEQ ID NO: 1785 - RNA, 19 nt, Artificial Sequence
  CEP290-967 targeting domain (RNA)
uguuggcuacauccauucc

SEQ ID NO: 1786 - RNA, 22 nt, Artificial Sequence
  Targeting domain
uuuacagagugcauccaugguc

SEQ ID NO: 1787 - RNA, 21 nt, Artificial Sequence
  Targeting domain
uuacagagugcauccaugguc

SEQ ID NO: 1788 - RNA, 20 nt, Artificial Sequence
  Targeting domain
uacagagugcauccaugguc

SEQ ID NO: 1789 - RNA, 23 nt, Artificial Sequence
  Targeting domain
uccagcauuagaaaguccuaggc

SEQ ID NO: 1790 - RNA, 20 nt, Artificial Sequence
  Targeting domain
uggucccuggcuuuuguucc

SEQ ID NO: 1791 - RNA, 21 nt, Artificial Sequence
  Targeting domain
ucauagagacacauucaguaa

SEQ ID NO: 1792 - RNA, 18 nt, Artificial Sequence
  Targeting domain
uagagacacauucaguaa

SEQ ID NO: 1793 - RNA, 21 nt, Artificial Sequence
  Targeting domain
ucaaaagcuuuugcuggcuca

SEQ ID NO: 1794 - RNA, 22 nt, Artificial Sequence
  CEP290-985 targeting domain (RNA)
uccauaagccucuauuucugau

SEQ ID NO: 1795 - RNA, 18 nt, Artificial Sequence
  Targeting domain
uaagccucuauuucugau

SEQ ID NO: 1796 - RNA, 18 nt, Artificial Sequence
  CEP290-988 targeting domain (RNA)
ucuuuuaaccagacaucu

SEQ ID NO: 1797 - RNA, 22 nt, Artificial Sequence
  Targeting domain
uuuguucuggguacagggguaa

SEQ ID NO: 1798 - RNA, 21 nt, Artificial Sequence
  Targeting domain
uuguucuggguacagggguaa

SEQ ID NO: 1799 - RNA, 20 nt, Artificial Sequence
  Targeting domain
uguucuggguacagggguaa

SEQ ID NO: 1800 - RNA, 18 nt, Artificial Sequence
  CEP290-992 targeting domain (RNA)
uucuggguacagggguaa

SEQ ID NO: 1801 - RNA, 23 nt, Artificial Sequence
  Targeting domain
ugacucauaauuuaguaggaauc

SEQ ID NO: 1802 - RNA, 19 nt, Artificial Sequence
  Targeting domain
ucauaauuuaguaggaauc

SEQ ID NO: 1803 - RNA, 24 nt, Artificial Sequence
  Targeting domain
uggaauggauguagccaacaguag

SEQ ID NO: 1804 - RNA, 19 nt, Artificial Sequence
  Targeting domain
uggauguagccaacaguag

SEQ ID NO: 1805 - RNA, 23 nt, Artificial Sequence
  Targeting domain
ucaccucucuuuggcaaaagcag

SEQ ID NO: 1806 - RNA, 18 nt, Artificial Sequence
  Targeting domain
ucucuuuggcaaaagcag

SEQ ID NO: 1807 - RNA, 20 nt, Artificial Sequence
  Targeting domain
uagaauauuguaaucaaagg

SEQ ID NO: 1808 - RNA, 24 nt, Artificial Sequence
  Targeting domain
uccaaggaacaaaagccagggacc

SEQ ID NO: 1809 - RNA, 21 nt, Artificial Sequence
  CEP290-1001 targeting domain (RNA)
uccauuccaaggaacaaaagc

SEQ ID NO: 1810 - skipped

SEQ ID NO: 1811 - RNA, 19 nt, Artificial Sequence
  Targeting domain
uagaucuuauucuacuccu

SEQ ID NO: 1812 - RNA, 23 nt, Artificial Sequence
  Targeting domain
ucuugccuaggacuuucuaaugc

SEQ ID NO: 1813 - RNA, 21 nt, Artificial Sequence
  Targeting domain
uugccuaggacuuucuaaugc

SEQ ID NO: 1814 - RNA, 24 nt, Artificial Sequence
  Targeting domain
uccugauuuguucaucuuccucau

SEQ ID NO: 1815 - RNA, 21 nt, Artificial Sequence
  Targeting domain
ugauuuguucaucuuccucau

SEQ ID NO: 1816 - RNA, 18 nt, Artificial Sequence
  Targeting domain
uuuguucaucuuccucau

SEQ ID NO: 1817 - RNA, 18 nt, Artificial Sequence
  CEP290-1010 targeting domain (RNA)
ugauuauguuacuuuuua

SEQ ID NO: 1818 - RNA, 20 nt, Artificial Sequence
  CEP290-1011 targeting domain (RNA)
ucuuuuaaccagacaucuaa

SEQ ID NO: 1819 - RNA, 18 nt, Artificial Sequence
  Targeting domain
uuuuaaccagacaucuaa

SEQ ID NO: 1820 - RNA, 22 nt, Artificial Sequence
  Targeting domain
ucuguccuauccucuccagcau

SEQ ID NO: 1821 - skipped

SEQ ID NO: 1822 - RNA, 18 nt, Artificial Sequence
  Targeting domain
uccuauccucuccagcau

SEQ ID NO: 1823 - RNA, 24 nt, Artificial Sequence
  Targeting domain
ugauaaacaugacucauaauuuag

SEQ ID NO: 1824 - RNA, 21 nt, Artificial Sequence
  Targeting domain
uaaacaugacucauaauuuag

SEQ ID NO: 1825 - RNA, 19 nt, Artificial Sequence
  Targeting domain
uagaauauuguaaucaaag

SEQ ID NO: 1826 - RNA, 24 nt, Artificial Sequence
  Targeting domain
uguucuggguacagggguaagaga

SEQ ID NO: 1827 - RNA, 22 nt, Artificial Sequence
  Targeting domain
uucuggguacagggguaagaga

SEQ ID NO: 1828 - RNA, 21 nt, Artificial Sequence
  Targeting domain
ucuggguacagggguaagaga

SEQ ID NO: 1829 - RNA, 19 nt, Artificial Sequence
  Targeting domain
uggguacagggguaagaga

SEQ ID NO: 1830 - RNA, 23 nt, Artificial Sequence
  CEP290-1023 targeting domain (RNA)
uaguuuguucuggguacaggggu

SEQ ID NO: 1831 - RNA, 20 nt, Artificial Sequence
  Targeting domain
uuuguucuggguacaggggu

SEQ ID NO: 1832 - RNA, 19 nt, Artificial Sequence
  Targeting domain
uuguucuggguacaggggu

SEQ ID NO: 1833 - RNA, 18 nt, Artificial Sequence
  Targeting domain
uguucuggguacaggggu

SEQ ID NO: 1834 - RNA, 23 nt, Artificial Sequence
  Targeting domain
uuugcuuucugcugcuuuugcca

SEQ ID NO: 1835 - RNA, 22 nt, Artificial Sequence
  Targeting domain
uugcuuucugcugcuuuugcca

SEQ ID NO: 1836 - RNA, 21 nt, Artificial Sequence
  Targeting domain
ugcuuucugcugcuuuugcca

SEQ ID NO: 1837 - RNA, 18 nt, Artificial Sequence
  Targeting domain
uuucugcugcuuuugcca

SEQ ID NO: 1838 - RNA, 18 nt, Artificial Sequence
  Targeting domain
ucuaagagaaaaaggagc

SEQ ID NO: 1839 - RNA, 23 nt, Artificial Sequence
  Targeting domain
uggagaggauaggacagaggaca

SEQ ID NO: 1840 - RNA, 24 nt, Artificial Sequence
  Targeting domain
uuaggaaagaugaaaaauacucuu

SEQ ID NO: 1841 - RNA, 23 nt, Artificial Sequence
  CEP290-1034 targeting domain (RNA)
uaggaaagaugaaaaauacucuu

SEQ ID NO: 1842 - RNA, 24 nt, Artificial Sequence
  Targeting domain
uaggaaagaugaaaaauacucuuu

SEQ ID NO: 1843 - RNA, 24 nt, Artificial Sequence
  CEP290-1036 targeting domain (RNA)
uuuaggaaagaugaaaaauacucu

SEQ ID NO: 1844 - RNA, 23 nt, Artificial Sequence
  CEP290-1037 targeting domain (RNA)
uuaggaaagaugaaaaauacucu

SEQ ID NO: 1845 - RNA, 22 nt, Artificial Sequence
  Targeting domain
uaggaaagaugaaaaauacucu

SEQ ID NO: 1846 - RNA, 21 nt, Artificial Sequence
  Targeting domain
uaggacagaggacauggagaa

SEQ ID NO: 1847 - skipped

SEQ ID NO: 1848 - RNA, 21 nt, Artificial Sequence
  Targeting domain
uuuauucuacaauaaaaaaug

SEQ ID NO: 1849 - RNA, 20 nt, Artificial Sequence
  Targeting domain
uuauucuacaauaaaaaaug

SEQ ID NO: 1850 - RNA, 19 nt, Artificial Sequence
  Targeting domain
uauucuacaauaaaaaaug

SEQ ID NO: 1851 - RNA, 23 nt, Artificial Sequence
  Targeting domain
uuguguguguguguguguguuau

SEQ ID NO: 1852 - RNA, 22 nt, Artificial Sequence
  Targeting domain
uguguguguguguguguguuau

SEQ ID NO: 1853 - RNA, 20 nt, Artificial Sequence
  Targeting domain
uguguguguguguguguuau

SEQ ID NO: 1854 - RNA, 18 nt, Artificial Sequence
  Targeting domain
uguguguguguguguuau

SEQ ID NO: 1855 - RNA, 24 nt, Artificial Sequence
  Targeting domain
uuguguguguguguguguguuaug

SEQ ID NO: 1856 - RNA, 23 nt, Artificial Sequence
  Targeting domain
uguguguguguguguguguuaug

SEQ ID NO: 1857 - RNA, 21 nt, Artificial Sequence
  Targeting domain
uguguguguguguguguuaug

SEQ ID NO: 1858 - RNA, 19 nt, Artificial Sequence
  Targeting domain
uguguguguguguguuaug

SEQ ID NO: 1859 - RNA, 22 nt, Artificial Sequence
  Targeting domain
acuguuggcuacauccauucca

SEQ ID NO: 1860 - RNA, 24 nt, Artificial Sequence
  Targeting domain
auuauccacaagaugucucuugcc

SEQ ID NO: 1861 - RNA, 21 nt, Artificial Sequence
  Targeting domain
auccacaagaugucucuugcc

SEQ ID NO: 1862 - RNA, 18 nt, Artificial Sequence
  Targeting domain
augagccagcaaaagcuu

SEQ ID NO: 1863 - RNA, 23 nt, Artificial Sequence
  Targeting domain
acagagugcauccaugguccagg

SEQ ID NO: 1864 - RNA, 21 nt, Artificial Sequence
  Targeting domain
agagugcauccaugguccagg

SEQ ID NO: 1865 - RNA, 19 nt, Artificial Sequence
  CEP290-1058 targeting domain (RNA)
agugcauccaugguccagg

SEQ ID NO: 1866 - RNA, 23 nt, Artificial Sequence
  CEP290-1059 targeting domain (RNA)
agcugaaauauuaagggcucuuc

SEQ ID NO: 1867 - RNA, 18 nt, Artificial Sequence
  CEP290-1060 targeting domain (RNA)
aaauauuaagggcucuuc

SEQ ID NO: 1868 - RNA, 23 nt, Artificial Sequence
  CEP290-1061 targeting domain (RNA)
aacucuauaccuuuuacugagga

SEQ ID NO: 1869 - RNA, 22 nt, Artificial Sequence
  CEP290-1062 targeting domain (RNA)
acucuauaccuuuuacugagga

SEQ ID NO: 1870 - RNA, 23 nt, Artificial Sequence
  CEP290-1063 targeting domain (RNA)
acuugaacucuauaccuuuuacu

SEQ ID NO: 1871 - RNA, 18 nt, Artificial Sequence
  Targeting domain
aacucuauaccuuuuacu

SEQ ID NO: 1872 - RNA, 22 nt, Artificial Sequence
  Targeting domain
aguaggaauccugaaagcuacu

SEQ ID NO: 1873 - RNA, 19 nt, Artificial Sequence
  Targeting domain
aggaauccugaaagcuacu

SEQ ID NO: 1874 - RNA, 22 nt, Artificial Sequence
  Targeting domain
agccaacaguagcugaaauauu

SEQ ID NO: 1875 - RNA, 18 nt, Artificial Sequence
  Targeting domain
aacaguagcugaaauauu

SEQ ID NO: 1876 - RNA, 23 nt, Artificial Sequence
  Targeting domain
auccauuccaaggaacaaaagcc

SEQ ID NO: 1877 - RNA, 19 nt, Artificial Sequence
  Targeting domain
auuccaaggaacaaaagcc

SEQ ID NO: 1878 - RNA, 24 nt, Artificial Sequence
  Targeting domain
aucccuuucucuuaccccuguacc

SEQ ID NO: 1879 - RNA, 24 nt, Artificial Sequence
  Targeting domain
aggacuuucuaaugcuggagagga

SEQ ID NO: 1880 - RNA, 21 nt, Artificial Sequence
  Targeting domain
acuuucuaaugcuggagagga

SEQ ID NO: 1881 - RNA, 21 nt, Artificial Sequence
  Targeting domain
aaugcuggagaggauaggaca

SEQ ID NO: 1882 - skipped

SEQ ID NO: 1883 - RNA, 23 nt, Artificial Sequence
  Targeting domain
aucauaaguuacaaucugugaau

SEQ ID NO: 1884 - RNA, 20 nt, Artificial Sequence
  Targeting domain
auaaguuacaaucugugaau

SEQ ID NO: 1885 - RNA, 18 nt, Artificial Sequence
  Targeting domain
aaguuacaaucugugaau

SEQ ID NO: 1886 - RNA, 21 nt, Artificial Sequence
  Targeting domain
aaccagacaucuaagagaaaa

SEQ ID NO: 1887 - skipped

SEQ ID NO: 1888 - RNA, 24 nt, Artificial Sequence
  Targeting domain
aagccucuauuucugaugaggaag

SEQ ID NO: 1889 - RNA, 23 nt, Artificial Sequence
  Targeting domain
agccucuauuucugaugaggaag

SEQ ID NO: 1890 - skipped

SEQ ID NO: 1891 - RNA, 19 nt, Artificial Sequence
  Targeting domain
auuuacugaaugugucucu

SEQ ID NO: 1892 - RNA, 19 nt, Artificial Sequence
  Targeting domain
acagggguaagagaaaggg

SEQ ID NO: 1893 - RNA, 24 nt, Artificial Sequence
  Targeting domain
cuacuguuggcuacauccauucca

SEQ ID NO: 1894 - RNA, 21 nt, Artificial Sequence
  Targeting domain
cuguuggcuacauccauucca

SEQ ID NO: 1895 - RNA, 19 nt, Artificial Sequence
  Targeting domain
ccacaagaugucucuugcc

SEQ ID NO: 1896 - RNA, 18 nt, Artificial Sequence
  Targeting domain
cacaagaugucucuugcc

SEQ ID NO: 1897 - RNA, 24 nt, Artificial Sequence
  Targeting domain
ccuuuguaguuaucuuacagccac

SEQ ID NO: 1898 - RNA, 23 nt, Artificial Sequence
  Targeting domain
cuuuguaguuaucuuacagccac

SEQ ID NO: 1899 - RNA, 22 nt, Artificial Sequence
  Targeting domain
cucuaugagccagcaaaagcuu

SEQ ID NO: 1900 - skipped

SEQ ID NO: 1901 - RNA, 22 nt, Artificial Sequence
  Targeting domain
cagagugcauccaugguccagg

SEQ ID NO: 1902 - RNA, 21 nt, Artificial Sequence
  Targeting domain
cugaaauauuaagggcucuuc

SEQ ID NO: 1903 - RNA, 21 nt, Artificial Sequence
  Targeting domain
cucuauaccuuuuacugagga

SEQ ID NO: 1904 - RNA, 19 nt, Artificial Sequence
  Targeting domain
cuauaccuuuuacugagga

SEQ ID NO: 1905 - RNA, 24 nt, Artificial Sequence
  Targeting domain
cacuugaacucuauaccuuuuacu

SEQ ID NO: 1906 - RNA, 22 nt, Artificial Sequence
  Targeting domain
cuugaacucuauaccuuuuacu

SEQ ID NO: 1907 - RNA, 20 nt, Artificial Sequence
  Targeting domain
ccaacaguagcugaaauauu

SEQ ID NO: 1908 - RNA, 19 nt, Artificial Sequence
  Targeting domain
caacaguagcugaaauauu

SEQ ID NO: 1909 - RNA, 24 nt, Artificial Sequence
  Targeting domain
cauccauuccaaggaacaaaagcc

SEQ ID NO: 1910 - RNA, 21 nt, Artificial Sequence
  Targeting domain
ccauuccaaggaacaaaagcc

SEQ ID NO: 1911 - skipped

SEQ ID NO: 1912 - RNA, 22 nt, Artificial Sequence
  Targeting domain
cccuuucucuuaccccuguacc

SEQ ID NO: 1913 - RNA, 21 nt, Artificial Sequence
  Targeting domain
ccuuucucuuaccccuguacc

SEQ ID NO: 1914 - RNA, 20 nt, Artificial Sequence
  Targeting domain
cuuucucuuaccccuguacc

SEQ ID NO: 1915 - skipped

SEQ ID NO: 1916 - RNA, 23 nt, Artificial Sequence
  Targeting domain
cuaaugcuggagaggauaggaca

SEQ ID NO: 1917 - RNA, 21 nt, Artificial Sequence
  Targeting domain
cauaaguuacaaucugugaau

SEQ ID NO: 1918 - RNA, 19 nt, Artificial Sequence
  Targeting domain
ccagacaucuaagagaaaa

SEQ ID NO: 1919 - RNA, 18 nt, Artificial Sequence
  Targeting domain
cagacaucuaagagaaaa

SEQ ID NO: 1920 - RNA, 21 nt, Artificial Sequence
  Targeting domain
ccucuauuucugaugaggaag

SEQ ID NO: 1921 - skipped

SEQ ID NO: 1922 - RNA, 18 nt, Artificial Sequence
  Targeting domain
cuauuucugaugaggaag

SEQ ID NO: 1923 - RNA, 23 nt, Artificial Sequence
  Targeting domain
cugaugaggaagaugaacaaauc

SEQ ID NO: 1924 - skipped

SEQ ID NO: 1925 - RNA, 18 nt, Artificial Sequence
  Targeting domain
cagggguaagagaaaggg

SEQ ID NO: 1926 - RNA, 19 nt, Artificial Sequence
  Targeting domain
guuggcuacauccauucca

SEQ ID NO: 1927 - RNA, 19 nt, Artificial Sequence
  Targeting domain
guaguuaucuuacagccac

SEQ ID NO: 1928 - RNA, 24 nt, Artificial Sequence
  Targeting domain
gucucuaugagccagcaaaagcuu

SEQ ID NO: 1929 - RNA, 20 nt, Artificial Sequence
  Targeting domain
gagugcauccaugguccagg

SEQ ID NO: 1930 - RNA, 18 nt, Artificial Sequence
  Targeting domain
gugcauccaugguccagg

SEQ ID NO: 1931 - RNA, 22 nt, Artificial Sequence
  Targeting domain
gcugaaauauuaagggcucuuc

SEQ ID NO: 1932 - RNA, 19 nt, Artificial Sequence
  Targeting domain
gaaauauuaagggcucuuc

SEQ ID NO: 1933 - RNA, 24 nt, Artificial Sequence
  Targeting domain
gaacucuauaccuuuuacugagga

SEQ ID NO: 1934 - RNA, 19 nt, Artificial Sequence
  Targeting domain
gaacucuauaccuuuuacu

SEQ ID NO: 1935 - RNA, 21 nt, Artificial Sequence
  Targeting domain
guaggaauccugaaagcuacu

SEQ ID NO: 1936 - RNA, 18 nt, Artificial Sequence
  Targeting domain
ggaauccugaaagcuacu

SEQ ID NO: 1937 - RNA, 24 nt, Artificial Sequence
  Targeting domain
guagccaacaguagcugaaauauu

SEQ ID NO: 1938 - RNA, 21 nt, Artificial Sequence
  Targeting domain
gccaacaguagcugaaauauu

SEQ ID NO: 1939 - RNA, 23 nt, Artificial Sequence
  Targeting domain
ggacuuucuaaugcuggagagga

SEQ ID NO: 1940 - RNA, 22 nt, Artificial Sequence
  CEP290-1133 targeting domain (RNA)
gacuuucuaaugcuggagagga

SEQ ID NO: 1941 - RNA, 18 nt, Artificial Sequence
  Targeting domain
gcuggagaggauaggaca

SEQ ID NO: 1942 - RNA, 22 nt, Artificial Sequence
  Targeting domain
gccucuauuucugaugaggaag

SEQ ID NO: 1943 - RNA, 21 nt, Artificial Sequence
  Targeting domain
gaugaggaagaugaacaaauc

SEQ ID NO: 1944 - RNA, 18 nt, Artificial Sequence
  Targeting domain
gaggaagaugaacaaauc

SEQ ID NO: 1945 - RNA, 23 nt, Artificial Sequence
  Targeting domain
ggguacagggguaagagaaaggg

SEQ ID NO: 1946 - RNA, 22 nt, Artificial Sequence
  Targeting domain
gguacagggguaagagaaaggg

SEQ ID NO: 1947 - RNA, 21 nt, Artificial Sequence
  Targeting domain
guacagggguaagagaaaggg

SEQ ID NO: 1948 - RNA, 23 nt, Artificial Sequence
  Targeting domain
guguguguguguguguguuaugu

SEQ ID NO: 1949 - RNA, 21 nt, Artificial Sequence
  Targeting domain
guguguguguguguguuaugu

SEQ ID NO: 1950 - RNA, 19 nt, Artificial Sequence
  Targeting domain
guguguguguguguuaugu

SEQ ID NO: 1951 - RNA, 23 nt, Artificial Sequence
  Targeting domain
uacuguuggcuacauccauucca

SEQ ID NO: 1952 - RNA, 20 nt, Artificial Sequence
  Targeting domain
uguuggcuacauccauucca

SEQ ID NO: 1953 - RNA, 18 nt, Artificial Sequence
  Targeting domain
uuggcuacauccauucca

SEQ ID NO: 1954 - RNA, 23 nt, Artificial Sequence
  Targeting domain
uuauccacaagaugucucuugcc

SEQ ID NO: 1955 - RNA, 22 nt, Artificial Sequence
  Targeting domain
uauccacaagaugucucuugcc

SEQ ID NO: 1956 - skipped

SEQ ID NO: 1957 - RNA, 22 nt, Artificial Sequence
  Targeting domain
uuuguaguuaucuuacagccac

SEQ ID NO: 1958 - RNA, 21 nt, Artificial Sequence
  Targeting domain
uuguaguuaucuuacagccac

SEQ ID NO: 1959 - RNA, 20 nt, Artificial Sequence
  Targeting domain
uguaguuaucuuacagccac

SEQ ID NO: 1960 - RNA, 18 nt, Artificial Sequence
  Targeting domain
uaguuaucuuacagccac

SEQ ID NO: 1961 - RNA, 23 nt, Artificial Sequence
  Targeting domain
ucucuaugagccagcaaaagcuu

SEQ ID NO: 1962 - RNA, 21 nt, Artificial Sequence
  Targeting domain
ucuaugagccagcaaaagcuu

SEQ ID NO: 1963 - RNA, 19 nt, Artificial Sequence
  Targeting domain
uaugagccagcaaaagcuu

SEQ ID NO: 1964 - RNA, 24 nt, Artificial Sequence
  Targeting domain
uacagagugcauccaugguccagg

SEQ ID NO: 1965 - RNA, 24 nt, Artificial Sequence
  Targeting domain
uagcugaaauauuaagggcucuuc

SEQ ID NO: 1966 - RNA, 20 nt, Artificial Sequence
  Targeting domain
ugaaauauuaagggcucuuc

SEQ ID NO: 1967 - skipped

SEQ ID NO: 1968 - RNA, 18 nt, Artificial Sequence
  Targeting domain
uauaccuuuuacugagga

SEQ ID NO: 1969 - RNA, 21 nt, Artificial Sequence
  Targeting domain
uugaacucuauaccuuuuacu

SEQ ID NO: 1970 - RNA, 20 nt, Artificial Sequence
  Targeting domain
ugaacucuauaccuuuuacu

SEQ ID NO: 1971 - RNA, 24 nt, Artificial Sequence
  Targeting domain
uuaguaggaauccugaaagcuacu

SEQ ID NO: 1972 - RNA, 23 nt, Artificial Sequence
  Targeting domain
uaguaggaauccugaaagcuacu

SEQ ID NO: 1973 - skipped

SEQ ID NO: 1974 - RNA, 23 nt, Artificial Sequence
  Targeting domain
uagccaacaguagcugaaauauu

SEQ ID NO: 1975 - RNA, 22 nt, Artificial Sequence
  Targeting domain
uccauuccaaggaacaaaagcc

SEQ ID NO: 1976 - RNA, 18 nt, Artificial Sequence
  Targeting domain
uuccaaggaacaaaagcc

SEQ ID NO: 1977 - RNA, 23 nt, Artificial Sequence
  Targeting domain
ucccuuucucuuaccccuguacc

SEQ ID NO: 1978 - RNA, 19 nt, Artificial Sequence
  Targeting domain
uuucucuuaccccuguacc

SEQ ID NO: 1979 - RNA, 18 nt, Artificial Sequence
  Targeting domain
uucucuuaccccuguacc

SEQ ID NO: 1980 - RNA, 19 nt, Artificial Sequence
  Targeting domain
uuucuaaugcuggagagga

SEQ ID NO: 1981 - RNA, 18 nt, Artificial Sequence
  Targeting domain
uucuaaugcuggagagga

SEQ ID NO: 1982 - RNA, 24 nt, Artificial Sequence
  Targeting domain
ucuaaugcuggagaggauaggaca

SEQ ID NO: 1983 - RNA, 22 nt, Artificial Sequence
  Targeting domain
uaaugcuggagaggauaggaca

SEQ ID NO: 1984 - RNA, 19 nt, Artificial Sequence
  Targeting domain
ugcuggagaggauaggaca

SEQ ID NO: 1985 - RNA, 24 nt, Artificial Sequence
  Targeting domain
uaucauaaguuacaaucugugaau

SEQ ID NO: 1986 - RNA, 22 nt, Artificial Sequence
  Targeting domain
ucauaaguuacaaucugugaau

SEQ ID NO: 1987 - RNA, 19 nt, Artificial Sequence
  Targeting domain
uaaguuacaaucugugaau

SEQ ID NO: 1988 - RNA, 24 nt, Artificial Sequence
  Targeting domain
uuuaaccagacaucuaagagaaaa

SEQ ID NO: 1989 - RNA, 23 nt, Artificial Sequence
  Targeting domain
uuaaccagacaucuaagagaaaa

SEQ ID NO: 1990 - RNA, 22 nt, Artificial Sequence
  Targeting domain
uaaccagacaucuaagagaaaa

SEQ ID NO: 1991 - RNA, 19 nt, Artificial Sequence
  Targeting domain
ucuauuucugaugaggaag

SEQ ID NO: 1992 - RNA, 24 nt, Artificial Sequence
  Targeting domain
ucugaugaggaagaugaacaaauc

SEQ ID NO: 1993 - RNA, 22 nt, Artificial Sequence
  Targeting domain
ugaugaggaagaugaacaaauc

SEQ ID NO: 1994 - RNA, 19 nt, Artificial Sequence
  Targeting domain
ugaggaagaugaacaaauc

SEQ ID NO: 1995 - RNA, 24 nt, Artificial Sequence
  Targeting domain
uuuucauuuacugaaugugucucu

SEQ ID NO: 1996 - RNA, 23 nt, Artificial Sequence
  Targeting domain
uuucauuuacugaaugugucucu

SEQ ID NO: 1997 - RNA, 22 nt, Artificial Sequence
  Targeting domain
uucauuuacugaaugugucucu

SEQ ID NO: 1998 - RNA, 21 nt, Artificial Sequence
  Targeting domain
ucauuuacugaaugugucucu

SEQ ID NO: 1999 - RNA, 18 nt, Artificial Sequence
  Targeting domain
uuuacugaaugugucucu

SEQ ID NO: 2000 - RNA, 24 nt, Artificial Sequence
  Targeting domain
uggguacagggguaagagaaaggg

SEQ ID NO: 2001 - RNA, 20 nt, Artificial Sequence
  Targeting domain
uacagggguaagagaaaggg

SEQ ID NO: 2002 - RNA, 24 nt, Artificial Sequence
  Targeting domain
uguguguguguguguguguuaugu

SEQ ID NO: 2003 - RNA, 22 nt, Artificial Sequence
  Targeting domain
uguguguguguguguguuaugu

SEQ ID NO: 2004 - skipped

SEQ ID NO: 2005 - RNA, 18 nt, Artificial Sequence
  Targeting domain
uguguguguguguuaugu

SEQ ID NO: 2006 - RNA, 24 nt, Artificial Sequence
  Targeting domain
auuuacagagugcauccauggucc

SEQ ID NO: 2007 - skipped

SEQ ID NO: 2008 - RNA, 18 nt, Artificial Sequence
  Targeting domain
agagugcauccauggucc

SEQ ID NO: 2009 - RNA, 21 nt, Artificial Sequence
  Targeting domain
acuugaacucuauaccuuuua

SEQ ID NO: 2010 - RNA, 22 nt, Artificial Sequence
  CEP290-1203 targeting domain (RNA)
agcuaaaucaugcaagugaccu

SEQ ID NO: 2011 - RNA, 18 nt, Artificial Sequence
  Targeting domain
aaaucaugcaagugaccu

SEQ ID NO: 2012 - RNA, 24 nt, Artificial Sequence
  Targeting domain
auccauaagccucuauuucugaug

SEQ ID NO: 2013 - skipped

SEQ ID NO: 2014 - RNA, 18 nt, Artificial Sequence
  Targeting domain
aagccucuauuucugaug

SEQ ID NO: 2015 - RNA, 20 nt, Artificial Sequence
  Targeting domain
agaauaguuuguucugggua

SEQ ID NO: 2016 - RNA, 18 nt, Artificial Sequence
  Targeting domain
aauaguuuguucugggua

SEQ ID NO: 2017 - RNA, 24 nt, Artificial Sequence
  Targeting domain
aggagaaugaucuagauaaucauu

SEQ ID NO: 2018 - RNA, 21 nt, Artificial Sequence
  Targeting domain
agaaugaucuagauaaucauu

SEQ ID NO: 2019 - RNA, 19 nt, Artificial Sequence
  Targeting domain
aaugaucuagauaaucauu

SEQ ID NO: 2020 - RNA, 18 nt, Artificial Sequence
  Targeting domain
augaucuagauaaucauu

SEQ ID NO: 2021 - RNA, 19 nt, Artificial Sequence
  Targeting domain
aaugcuggagaggauagga

SEQ ID NO: 2022 - RNA, 18 nt, Artificial Sequence
  Targeting domain
augcuggagaggauagga

SEQ ID NO: 2023 - RNA, 24 nt, Artificial Sequence
  Targeting domain
aaaauccauaagccucuauuucug

SEQ ID NO: 2024 - RNA, 23 nt, Artificial Sequence
  Targeting domain
aaauccauaagccucuauuucug

SEQ ID NO: 2025 - RNA, 22 nt, Artificial Sequence
  Targeting domain
aauccauaagccucuauuucug

SEQ ID NO: 2026 - RNA, 21 nt, Artificial Sequence
  Targeting domain
auccauaagccucuauuucug

SEQ ID NO: 2027 - RNA, 23 nt, Artificial Sequence
  Targeting domain
aaacagguagaauauuguaauca

SEQ ID NO: 2028 - RNA, 22 nt, Artificial Sequence
  Targeting domain
aacagguagaauauuguaauca

SEQ ID NO: 2029 - RNA, 21 nt, Artificial Sequence
  Targeting domain
acagguagaauauuguaauca

SEQ ID NO: 2030 - RNA, 19 nt, Artificial Sequence
  Targeting domain
agguagaauauuguaauca

SEQ ID NO: 2031 - RNA, 22 nt, Artificial Sequence
  CEP290-1224 targeting domain (RNA)
aaggaacaaaagccagggacca

SEQ ID NO: 2032 - RNA, 21 nt, Artificial Sequence
  CEP290-1225 targeting domain (RNA)
aggaacaaaagccagggacca

SEQ ID NO: 2033 - RNA, 18 nt, Artificial Sequence
  Targeting domain
aacaaaagccagggacca

SEQ ID NO: 2034 - RNA, 24 nt, Artificial Sequence
  Targeting domain
agguagaauauuguaaucaaagga

SEQ ID NO: 2035 - skipped

SEQ ID NO: 2036 - RNA, 18 nt, Artificial Sequence
  Targeting domain
aauauuguaaucaaagga

SEQ ID NO: 2037 - RNA, 22 nt, Artificial Sequence
  CEP290-1230 targeting domain (RNA)
agucauguuuaucaauauuauu

SEQ ID NO: 2038 - RNA, 18 nt, Artificial Sequence
  Targeting domain
auguuuaucaauauuauu

SEQ ID NO: 2039 - RNA, 20 nt, Artificial Sequence
  Targeting domain
aaccagacaucuaagagaaa

SEQ ID NO: 2040 - RNA, 19 nt, Artificial Sequence
  Targeting domain
accagacaucuaagagaaa

SEQ ID NO: 2041 - RNA, 22 nt, Artificial Sequence
  Targeting domain
auucuuaucuaagauccuuuca

SEQ ID NO: 2042 - RNA, 24 nt, Artificial Sequence
  CEP290-1235 targeting domain (RNA)
aaacagguagaauauuguaaucaa

SEQ ID NO: 2043 - RNA, 23 nt, Artificial Sequence
  CEP290-1236 targeting domain (RNA)
aacagguagaauauuguaaucaa

SEQ ID NO: 2044 - RNA, 22 nt, Artificial Sequence
  Targeting domain
acagguagaauauuguaaucaa

SEQ ID NO: 2045 - skipped

SEQ ID NO: 2046 - RNA, 19 nt, Artificial Sequence
  Targeting domain
augaggaagaugaacaaau

SEQ ID NO: 2047 - RNA, 19 nt, Artificial Sequence
  Targeting domain
agaggauaggacagaggac

SEQ ID NO: 2048 - RNA, 19 nt, Artificial Sequence
  Targeting domain
cagagugcauccauggucc

SEQ ID NO: 2049 - RNA, 24 nt, Artificial Sequence
  Targeting domain
cuugccuaggacuuucuaaugcug

SEQ ID NO: 2050 - skipped

SEQ ID NO: 2051 - RNA, 19 nt, Artificial Sequence
  Targeting domain
cuaggacuuucuaaugcug

SEQ ID NO: 2052 - RNA, 23 nt, Artificial Sequence
  CEP290-1245 targeting domain (RNA)
ccacuugaacucuauaccuuuua

SEQ ID NO: 2053 - RNA, 22 nt, Artificial Sequence
  Targeting domain
cacuugaacucuauaccuuuua

SEQ ID NO: 2054 - RNA, 20 nt, Artificial Sequence
  Targeting domain
cuugaacucuauaccuuuua

SEQ ID NO: 2055 - RNA, 23 nt, Artificial Sequence
  Targeting domain
cagcuaaaucaugcaagugaccu

SEQ ID NO: 2056 - RNA, 20 nt, Artificial Sequence
  Targeting domain
cuaaaucaugcaagugaccu

SEQ ID NO: 2057 - RNA, 23 nt, Artificial Sequence
  Targeting domain
cucuugccuaggacuuucuaaug

SEQ ID NO: 2058 - RNA, 21 nt, Artificial Sequence
  Targeting domain
cuugccuaggacuuucuaaug

SEQ ID NO: 2059 - RNA, 22 nt, Artificial Sequence
  Targeting domain
ccauaagccucuauuucugaug

SEQ ID NO: 2060 - RNA, 21 nt, Artificial Sequence
  Targeting domain
cauaagccucuauuucugaug

SEQ ID NO: 2061 - RNA, 21 nt, Artificial Sequence
  Targeting domain
cuaaugcuggagaggauagga

SEQ ID NO: 2062 - RNA, 19 nt, Artificial Sequence
  Targeting domain
ccauaagccucuauuucug

SEQ ID NO: 2063 - RNA, 18 nt, Artificial Sequence
  Targeting domain
cauaagccucuauuucug

SEQ ID NO: 2064 - RNA, 20 nt, Artificial Sequence
  Targeting domain
cagguagaauauuguaauca

SEQ ID NO: 2065 - RNA, 21 nt, Artificial Sequence
  Targeting domain
cuuucugcugcuuuugccaaa

SEQ ID NO: 2066 - RNA, 24 nt, Artificial Sequence
  Targeting domain
ccaaggaacaaaagccagggacca

SEQ ID NO: 2067 - RNA, 23 nt, Artificial Sequence
  Targeting domain
caaggaacaaaagccagggacca

SEQ ID NO: 2068 - RNA, 19 nt, Artificial Sequence
  Targeting domain
cucuuagaugucugguuaa

SEQ ID NO: 2069 - RNA, 19 nt, Artificial Sequence
  Targeting domain
cauguuuaucaauauuauu

SEQ ID NO: 2070 - RNA, 18 nt, Artificial Sequence
  Targeting domain
ccagacaucuaagagaaa

SEQ ID NO: 2071 - RNA, 19 nt, Artificial Sequence
  Targeting domain
cuuaucuaagauccuuuca

SEQ ID NO: 2072 - RNA, 21 nt, Artificial Sequence
  Targeting domain
cagguagaauauuguaaucaa

SEQ ID NO: 2073 - RNA, 22 nt, Artificial Sequence
  Targeting domain
cugaugaggaagaugaacaaau

SEQ ID NO: 2074 - RNA, 23 nt, Artificial Sequence
  Targeting domain
cuggagaggauaggacagaggac

SEQ ID NO: 2075 - RNA, 18 nt, Artificial Sequence
  Targeting domain
caucuuccucaucagaaa

SEQ ID NO: 2076 - RNA, 21 nt, Artificial Sequence
  Targeting domain
gccuaggacuuucuaaugcug

SEQ ID NO: 2077 - RNA, 24 nt, Artificial Sequence
  CEP290-1270 targeting domain (RNA)
gccacuugaacucuauaccuuuua

SEQ ID NO: 2078 - RNA, 21 nt, Artificial Sequence
  Targeting domain
gcuaaaucaugcaagugaccu

SEQ ID NO: 2079 - RNA, 18 nt, Artificial Sequence
  Targeting domain
gccuaggacuuucuaaug

SEQ ID NO: 2080 - RNA, 23 nt, Artificial Sequence
  Targeting domain
gggagaauaguuuguucugggua

SEQ ID NO: 2081 - RNA, 22 nt, Artificial Sequence
  Targeting domain
ggagaauaguuuguucugggua

SEQ ID NO: 2082 - RNA, 21 nt, Artificial Sequence
  Targeting domain
gagaauaguuuguucugggua

SEQ ID NO: 2083 - RNA, 19 nt, Artificial Sequence
  Targeting domain
gaauaguuuguucugggua

SEQ ID NO: 2084 - RNA, 23 nt, Artificial Sequence
  Targeting domain
ggagaaugaucuagauaaucauu

SEQ ID NO: 2085 - RNA, 22 nt, Artificial Sequence
  Targeting domain
gagaaugaucuagauaaucauu

SEQ ID NO: 2086 - RNA, 20 nt, Artificial Sequence
  Targeting domain
gaaugaucuagauaaucauu

SEQ ID NO: 2087 - RNA, 24 nt, Artificial Sequence
  Targeting domain
gaaacagguagaauauuguaauca

SEQ ID NO: 2088 - RNA, 18 nt, Artificial Sequence
  Targeting domain
gguagaauauuguaauca

SEQ ID NO: 2089 - RNA, 22 nt, Artificial Sequence
  Targeting domain
gcuuucugcugcuuuugccaaa

SEQ ID NO: 2090 - RNA, 19 nt, Artificial Sequence
  Targeting domain
gaacaaaagccagggacca

SEQ ID NO: 2091 - RNA, 23 nt, Artificial Sequence
  Targeting domain
gguagaauauuguaaucaaagga

SEQ ID NO: 2092 - RNA, 22 nt, Artificial Sequence
  Targeting domain
guagaauauuguaaucaaagga

SEQ ID NO: 2093 - RNA, 19 nt, Artificial Sequence
  Targeting domain
gaauauuguaaucaaagga

SEQ ID NO: 2094 - RNA, 23 nt, Artificial Sequence
  Targeting domain
gagucauguuuaucaauauuauu

SEQ ID NO: 2095 - RNA, 21 nt, Artificial Sequence
  Targeting domain
gucauguuuaucaauauuauu

SEQ ID NO: 2096 - RNA, 19 nt, Artificial Sequence
  Targeting domain
gguagaauauuguaaucaa

SEQ ID NO: 2097 - RNA, 18 nt, Artificial Sequence
  Targeting domain
guagaauauuguaaucaa

SEQ ID NO: 2098 - skipped

SEQ ID NO: 2099 - RNA, 24 nt, Artificial Sequence
  Targeting domain
gcuggagaggauaggacagaggac

SEQ ID NO: 2100 - RNA, 21 nt, Artificial Sequence
  Targeting domain
ggagaggauaggacagaggac

SEQ ID NO: 2101 - skipped

SEQ ID NO: 2102 - RNA, 18 nt, Artificial Sequence
  Targeting domain
gaggauaggacagaggac

SEQ ID NO: 2103 - RNA, 21 nt, Artificial Sequence
  Targeting domain
guucaucuuccucaucagaaa

SEQ ID NO: 2104 - RNA, 23 nt, Artificial Sequence
  Targeting domain
uuuacagagugcauccauggucc

SEQ ID NO: 2105 - RNA, 22 nt, Artificial Sequence
  Targeting domain
uuacagagugcauccauggucc

SEQ ID NO: 2106 - RNA, 21 nt, Artificial Sequence
  Targeting domain
uacagagugcauccauggucc

SEQ ID NO: 2107 - RNA, 23 nt, Artificial Sequence
  Targeting domain
uugccuaggacuuucuaaugcug

SEQ ID NO: 2108 - RNA, 22 nt, Artificial Sequence
  Targeting domain
ugccuaggacuuucuaaugcug

SEQ ID NO: 2109 - RNA, 18 nt, Artificial Sequence
  Targeting domain
uaggacuuucuaaugcug

SEQ ID NO: 2110 - RNA, 19 nt, Artificial Sequence
  Targeting domain
uugaacucuauaccuuuua

SEQ ID NO: 2111 - RNA, 18 nt, Artificial Sequence
  Targeting domain
ugaacucuauaccuuuua

SEQ ID NO: 2112 - RNA, 24 nt, Artificial Sequence
  Targeting domain
ucagcuaaaucaugcaagugaccu

SEQ ID NO: 2113 - RNA, 19 nt, Artificial Sequence
  Targeting domain
uaaaucaugcaagugaccu

SEQ ID NO: 2114 - RNA, 24 nt, Artificial Sequence
  Targeting domain
ucucuugccuaggacuuucuaaug

SEQ ID NO: 2115 - RNA, 22 nt, Artificial Sequence
  Targeting domain
ucuugccuaggacuuucuaaug

SEQ ID NO: 2116 - skipped

SEQ ID NO: 2117 - RNA, 19 nt, Artificial Sequence
  Targeting domain
ugccuaggacuuucuaaug

SEQ ID NO: 2118 - RNA, 23 nt, Artificial Sequence
  Targeting domain
uccauaagccucuauuucugaug

SEQ ID NO: 2119 - RNA, 19 nt, Artificial Sequence
  Targeting domain
uaagccucuauuucugaug

SEQ ID NO: 2120 - RNA, 24 nt, Artificial Sequence
  Targeting domain
ugggagaauaguuuguucugggua

SEQ ID NO: 2121 - RNA, 24 nt, Artificial Sequence
  Targeting domain
uuucuaaugcuggagaggauagga

SEQ ID NO: 2122 - RNA, 23 nt, Artificial Sequence
  Targeting domain
uucuaaugcuggagaggauagga

SEQ ID NO: 2123 - RNA, 22 nt, Artificial Sequence
  Targeting domain
ucuaaugcuggagaggauagga

SEQ ID NO: 2124-2125 - skipped (2 entries)

SEQ ID NO: 2126 - RNA, 24 nt, Artificial Sequence
  Targeting domain
uugcuuucugcugcuuuugccaaa

SEQ ID NO: 2127 - RNA, 23 nt, Artificial Sequence
  Targeting domain
ugcuuucugcugcuuuugccaaa

SEQ ID NO: 2128 - skipped

SEQ ID NO: 2129 - RNA, 19 nt, Artificial Sequence
  Targeting domain
uucugcugcuuuugccaaa

SEQ ID NO: 2130 - RNA, 18 nt, Artificial Sequence
  Targeting domain
ucugcugcuuuugccaaa

SEQ ID NO: 2131 - RNA, 21 nt, Artificial Sequence
  Targeting domain
uagaauauuguaaucaaagga

SEQ ID NO: 2132 - RNA, 24 nt, Artificial Sequence
  Targeting domain
uuuuucucuuagaugucugguuaa

SEQ ID NO: 2133 - RNA, 23 nt, Artificial Sequence
  Targeting domain
uuuucucuuagaugucugguuaa

SEQ ID NO: 2134 - RNA, 22 nt, Artificial Sequence
  Targeting domain
uuucucuuagaugucugguuaa

SEQ ID NO: 2135 - RNA, 21 nt, Artificial Sequence
  Targeting domain
uucucuuagaugucugguuaa

SEQ ID NO: 2136 - RNA, 20 nt, Artificial Sequence
  Targeting domain
ucucuuagaugucugguuaa

SEQ ID NO: 2137 - RNA, 18 nt, Artificial Sequence
  Targeting domain
ucuuagaugucugguuaa

SEQ ID NO: 2138 - RNA, 24 nt, Artificial Sequence
  Targeting domain
ugagucauguuuaucaauauuauu

SEQ ID NO: 2139 - skipped

SEQ ID NO: 2140 - RNA, 24 nt, Artificial Sequence
  Targeting domain
uuuuaaccagacaucuaagagaaa

SEQ ID NO: 2141 - RNA, 23 nt, Artificial Sequence
  Targeting domain
uuuaaccagacaucuaagagaaa

SEQ ID NO: 2142 - RNA, 22 nt, Artificial Sequence
  Targeting domain
uuaaccagacaucuaagagaaa

SEQ ID NO: 2143 - RNA, 21 nt, Artificial Sequence
  Targeting domain
uaaccagacaucuaagagaaa

SEQ ID NO: 2144 - RNA, 24 nt, Artificial Sequence
  Targeting domain
uuauucuuaucuaagauccuuuca

SEQ ID NO: 2145 - RNA, 23 nt, Artificial Sequence
  Targeting domain
uauucuuaucuaagauccuuuca

SEQ ID NO: 2146 - RNA, 21 nt, Artificial Sequence
  Targeting domain
uucuuaucuaagauccuuuca

SEQ ID NO: 2147 - skipped

SEQ ID NO: 2148 - RNA, 18 nt, Artificial Sequence
  Targeting domain
uuaucuaagauccuuuca

SEQ ID NO: 2149 - RNA, 24 nt, Artificial Sequence
  Targeting domain
uucugaugaggaagaugaacaaau

SEQ ID NO: 2150 - RNA, 23 nt, Artificial Sequence
  Targeting domain
ucugaugaggaagaugaacaaau

SEQ ID NO: 2151 - RNA, 21 nt, Artificial Sequence
  Targeting domain
ugaugaggaagaugaacaaau

SEQ ID NO: 2152 - RNA, 18 nt, Artificial Sequence
  Targeting domain
ugaggaagaugaacaaau

SEQ ID NO: 2153 - RNA, 22 nt, Artificial Sequence
  Targeting domain
uggagaggauaggacagaggac

SEQ ID NO: 2154 - RNA, 24 nt, Artificial Sequence
  Targeting domain
uuuguucaucuuccucaucagaaa

SEQ ID NO: 2155 - RNA, 23 nt, Artificial Sequence
  Targeting domain
uuguucaucuuccucaucagaaa

SEQ ID NO: 2156 - RNA, 22 nt, Artificial Sequence
  Targeting domain
uguucaucuuccucaucagaaa

SEQ ID NO: 2157 - skipped

SEQ ID NO: 2158 - RNA, 19 nt, Artificial Sequence
  Targeting domain
ucaucuuccucaucagaaa

SEQ ID NO: 2159 - RNA, 23 nt, Artificial Sequence
  Targeting domain
acuuaccucaugucaucuagagc

SEQ ID NO: 2160 - RNA, 19 nt, Artificial Sequence
  Targeting domain
accucaugucaucuagagc

SEQ ID NO: 2161 - RNA, 24 nt, Artificial Sequence
  Targeting domain
acaguuuuuaaggcggggagucac

SEQ ID NO: 2162 - RNA, 22 nt, Artificial Sequence
  Targeting domain
aguuuuuaaggcggggagucac

SEQ ID NO: 2163 - RNA, 19 nt, Artificial Sequence
  Targeting domain
acagaguucaagcuaauac

SEQ ID NO: 2164 - RNA, 24 nt, Artificial Sequence
  Targeting domain
auuagcuugaacucugugccaaac

SEQ ID NO: 2165 - RNA, 21 nt, Artificial Sequence
  Targeting domain
agcuugaacucugugccaaac

SEQ ID NO: 2166 - RNA, 22 nt, Artificial Sequence
  Targeting domain
auguggugucaaauauggugcu

SEQ ID NO: 2167 - RNA, 23 nt, Artificial Sequence
  Targeting domain
auguggugucaaauauggugcuu

SEQ ID NO: 2168 - RNA, 18 nt, Artificial Sequence
  Targeting domain
agaugacaugagguaagu

SEQ ID NO: 2169 - RNA, 22 nt, Artificial Sequence
  Targeting domain
aauacaugagagugauuagugg

SEQ ID NO: 2170 - RNA, 21 nt, Artificial Sequence
  Targeting domain
auacaugagagugauuagugg

SEQ ID NO: 2171 - RNA, 19 nt, Artificial Sequence
  Targeting domain
acaugagagugauuagugg

SEQ ID NO: 2172-2175 - skipped (4 entries)

SEQ ID NO: 2176 - RNA, 23 nt, Artificial Sequence
  Targeting domain
aaagguucaugagacuagagguc

SEQ ID NO: 2177 - RNA, 22 nt, Artificial Sequence
  Targeting domain
aagguucaugagacuagagguc

SEQ ID NO: 2178 - RNA, 21 nt, Artificial Sequence
  Targeting domain
agguucaugagacuagagguc

SEQ ID NO: 2179 - RNA, 21 nt, Artificial Sequence
  Targeting domain
aaacaggagauacucaacaca

SEQ ID NO: 2180 - skipped

SEQ ID NO: 2181 - RNA, 19 nt, Artificial Sequence
  Targeting domain
acaggagauacucaacaca

SEQ ID NO: 2182 - RNA, 23 nt, Artificial Sequence
  Targeting domain
agcacguacaaaagaacauacau

SEQ ID NO: 2183 - skipped

SEQ ID NO: 2184 - RNA, 19 nt, Artificial Sequence
  Targeting domain
aguaaggaggauguaagac

SEQ ID NO: 2185 - RNA, 21 nt, Artificial Sequence
  Targeting domain
agcuuuugacaguuuuuaagg

SEQ ID NO: 2186 - RNA, 24 nt, Artificial Sequence
  Targeting domain
aaauucacugagcaaaacaacugg

SEQ ID NO: 2187 - RNA, 23 nt, Artificial Sequence
  Targeting domain
aauucacugagcaaaacaacugg

SEQ ID NO: 2188 - RNA, 22 nt, Artificial Sequence
  Targeting domain
auucacugagcaaaacaacugg

SEQ ID NO: 2189 - RNA, 18 nt, Artificial Sequence
  Targeting domain
acugagcaaaacaacugg

SEQ ID NO: 2190 - skipped

SEQ ID NO: 2191 - RNA, 19 nt, Artificial Sequence
  Targeting domain
acaaguuuugaaacaggaa

SEQ ID NO: 2192 - RNA, 22 nt, Artificial Sequence
  Targeting domain
aaugccugaacaaguuuugaaa

SEQ ID NO: 2193 - RNA, 21 nt, Artificial Sequence
  Targeting domain
augccugaacaaguuuugaaa

SEQ ID NO: 2194 - RNA, 24 nt, Artificial Sequence
  Targeting domain
auucacugagcaaaacaacuggaa

SEQ ID NO: 2195 - skipped

SEQ ID NO: 2196 - RNA, 24 nt, Artificial Sequence
  Targeting domain
aaaaagguaaugccugaacaaguu

SEQ ID NO: 2197 - RNA, 23 nt, Artificial Sequence
  Targeting domain
aaaagguaaugccugaacaaguu

SEQ ID NO: 2198 - RNA, 22 nt, Artificial Sequence
  Targeting domain
aaagguaaugccugaacaaguu

SEQ ID NO: 2199 - RNA, 21 nt, Artificial Sequence
  Targeting domain
aagguaaugccugaacaaguu

SEQ ID NO: 2200 - skipped

SEQ ID NO: 2201 - RNA, 19 nt, Artificial Sequence
  Targeting domain
acgugcucuuuucuauaua

SEQ ID NO: 2202 - RNA, 23 nt, Artificial Sequence
  Targeting domain
auuaucuauuccauucuucacac

SEQ ID NO: 2203 - RNA, 20 nt, Artificial Sequence
  Targeting domain
aucuauuccauucuucacac

SEQ ID NO: 2204 - RNA, 24 nt, Artificial Sequence
  Targeting domain
aagagagaaaugguucccuauaua

SEQ ID NO: 2205 - RNA, 23 nt, Artificial Sequence
  Targeting domain
agagagaaaugguucccuauaua

SEQ ID NO: 2206 - RNA, 21 nt, Artificial Sequence
  Targeting domain
agagaaaugguucccuauaua

SEQ ID NO: 2207 - RNA, 19 nt, Artificial Sequence
  Targeting domain
agaaaugguucccuauaua

SEQ ID NO: 2208 - RNA, 19 nt, Artificial Sequence
  Targeting domain
aggaaauuauuguugcuuu

SEQ ID NO: 2209 - RNA, 22 nt, Artificial Sequence
  Targeting domain
acugagcaaaacaacuggaaga

SEQ ID NO: 2210 - RNA, 18 nt, Artificial Sequence
  Targeting domain
agcaaaacaacuggaaga

SEQ ID NO: 2211 - RNA, 24 nt, Artificial Sequence
  Targeting domain
auacauaagaaagaacacuguggu

SEQ ID NO: 2212 - RNA, 22 nt, Artificial Sequence
  Targeting domain
acauaagaaagaacacuguggu

SEQ ID NO: 2213 - skipped

SEQ ID NO: 2214 - RNA, 18 nt, Artificial Sequence
  Targeting domain
aagaaagaacacuguggu

SEQ ID NO: 2215 - RNA, 18 nt, Artificial Sequence
  Targeting domain
aagaauggaauagauaau

SEQ ID NO: 2216 - RNA, 22 nt, Artificial Sequence
  Targeting domain
aaggaggauguaagacuggaga

SEQ ID NO: 2217 - RNA, 21 nt, Artificial Sequence
  Targeting domain
aggaggauguaagacuggaga

SEQ ID NO: 2218 - RNA, 18 nt, Artificial Sequence
  Targeting domain
aggauguaagacuggaga

SEQ ID NO: 2219 - RNA, 23 nt, Artificial Sequence
  Targeting domain
aaaaacuugaaauuugauaguag

SEQ ID NO: 2220 - RNA, 22 nt, Artificial Sequence
  Targeting domain
aaaacuugaaauuugauaguag

SEQ ID NO: 2221 - RNA, 21 nt, Artificial Sequence
  Targeting domain
aaacuugaaauuugauaguag

SEQ ID NO: 2222 - RNA, 20 nt, Artificial Sequence
  Targeting domain
aacuugaaauuugauaguag

SEQ ID NO: 2223 - RNA, 19 nt, Artificial Sequence
  Targeting domain
acuugaaauuugauaguag

SEQ ID NO: 2224 - RNA, 18 nt, Artificial Sequence
  Targeting domain
acauaucugucuuccuua

SEQ ID NO: 2225 - RNA, 18 nt, Artificial Sequence
  CEP290-1418 targeting domain (RNA)
auuaaaaaaaguaugcuu

SEQ ID NO: 2226 - RNA, 24 nt, Artificial Sequence
  Targeting domain
auaucaaaagacuuauauuccauu

SEQ ID NO: 2227 - RNA, 22 nt, Artificial Sequence
  Targeting domain
aucaaaagacuuauauuccauu

SEQ ID NO: 2228 - RNA, 19 nt, Artificial Sequence
  Targeting domain
aaaagacuuauauuccauu

SEQ ID NO: 2229 - RNA, 18 nt, Artificial Sequence
  Targeting domain
aaagacuuauauuccauu

SEQ ID NO: 2230 - RNA, 24 nt, Artificial Sequence
  Targeting domain
aaaaucagauuucaugugugaaga

SEQ ID NO: 2231 - RNA, 23 nt, Artificial Sequence
  Targeting domain
aaaucagauuucaugugugaaga

SEQ ID NO: 2232 - RNA, 22 nt, Artificial Sequence
  Targeting domain
aaucagauuucaugugugaaga

SEQ ID NO: 2233 - RNA, 21 nt, Artificial Sequence
  Targeting domain
aucagauuucaugugugaaga

SEQ ID NO: 2234 - RNA, 18 nt, Artificial Sequence
  Targeting domain
agauuucaugugugaaga

SEQ ID NO: 2235 - RNA, 24 nt, Artificial Sequence
  Targeting domain
aauggaauauaagucuuuugauau

SEQ ID NO: 2236 - RNA, 23 nt, Artificial Sequence
  Targeting domain
auggaauauaagucuuuugauau

SEQ ID NO: 2237 - RNA, 19 nt, Artificial Sequence
  Targeting domain
aauauaagucuuuugauau

SEQ ID NO: 2238 - RNA, 18 nt, Artificial Sequence
  Targeting domain
auauaagucuuuugauau

SEQ ID NO: 2239 - RNA, 19 nt, Artificial Sequence
  Targeting domain
aagaauggaauagauaaua

SEQ ID NO: 2240 - RNA, 18 nt, Artificial Sequence
  Targeting domain
agaauggaauagauaaua

SEQ ID NO: 2241 - RNA, 24 nt, Artificial Sequence
  Targeting domain
aaaacuggauggguaauaaagcaa

SEQ ID NO: 2242 - RNA, 23 nt, Artificial Sequence
  Targeting domain
aaacuggauggguaauaaagcaa

SEQ ID NO: 2243 - RNA, 22 nt, Artificial Sequence
  Targeting domain
aacuggauggguaauaaagcaa

SEQ ID NO: 2244 - RNA, 21 nt, Artificial Sequence
  Targeting domain
acuggauggguaauaaagcaa

SEQ ID NO: 2245 - RNA, 24 nt, Artificial Sequence
  Targeting domain
auagaaauucacugagcaaaacaa

SEQ ID NO: 2246 - RNA, 22 nt, Artificial Sequence
  Targeting domain
agaaauucacugagcaaaacaa

SEQ ID NO: 2247 - skipped

SEQ ID NO: 2248 - RNA, 19 nt, Artificial Sequence
  Targeting domain
aauucacugagcaaaacaa

SEQ ID NO: 2249 - RNA, 18 nt, Artificial Sequence
  Targeting domain
auucacugagcaaaacaa

SEQ ID NO: 2250 - RNA, 24 nt, Artificial Sequence
  Targeting domain
aggauguaagacuggagauagaga

SEQ ID NO: 2251 - RNA, 21 nt, Artificial Sequence
  Targeting domain
auguaagacuggagauagaga

SEQ ID NO: 2252 - RNA, 21 nt, Artificial Sequence
  Targeting domain
aaauuugauaguagaagaaaa

SEQ ID NO: 2253 - RNA, 20 nt, Artificial Sequence
  Targeting domain
aauuugauaguagaagaaaa

SEQ ID NO: 2254 - RNA, 19 nt, Artificial Sequence
  Targeting domain
auuugauaguagaagaaaa

SEQ ID NO: 2255-2260 - skipped (6 entries)

SEQ ID NO: 2261 - RNA, 19 nt, Artificial Sequence
  Targeting domain
aauaaagcaaaagaaaaac

SEQ ID NO: 2262 - RNA, 18 nt, Artificial Sequence
  Targeting domain
auaaagcaaaagaaaaac

SEQ ID NO: 2263 - RNA, 24 nt, Artificial Sequence
  Targeting domain
auucuuuuuuuguuguuuuuuuuu

SEQ ID NO: 2264 - RNA, 20 nt, Artificial Sequence
  Targeting domain
acuccagccugggcaacaca

SEQ ID NO: 2265 - RNA, 22 nt, Artificial Sequence
  Targeting domain
cuuaccucaugucaucuagagc

SEQ ID NO: 2266 - RNA, 18 nt, Artificial Sequence
  Targeting domain
ccucaugucaucuagagc

SEQ ID NO: 2267 - RNA, 23 nt, Artificial Sequence
  Targeting domain
caguuuuuaaggcggggagucac

SEQ ID NO: 2268 - skipped

SEQ ID NO: 2269 - RNA, 18 nt, Artificial Sequence
  Targeting domain
cagaguucaagcuaauac

SEQ ID NO: 2270 - RNA, 19 nt, Artificial Sequence
  Targeting domain
cuugaacucugugccaaac

SEQ ID NO: 2271 - RNA, 23 nt, Artificial Sequence
  Targeting domain
cauguggugucaaauauggugcu

SEQ ID NO: 2272 - RNA, 24 nt, Artificial Sequence
  Targeting domain
cauguggugucaaauauggugcuu

SEQ ID NO: 2273 - RNA, 22 nt, Artificial Sequence
  Targeting domain
cucuagaugacaugagguaagu

SEQ ID NO: 2274 - skipped

SEQ ID NO: 2275 - RNA, 24 nt, Artificial Sequence
  Targeting domain
cuaauacaugagagugauuagugg

SEQ ID NO: 2276 - RNA, 18 nt, Artificial Sequence
  Targeting domain
caugagagugauuagugg

SEQ ID NO: 2277 - skipped

SEQ ID NO: 2278 - RNA, 23 nt, Artificial Sequence
  Targeting domain
ccaaacaggagauacucaacaca

SEQ ID NO: 2279 - RNA, 22 nt, Artificial Sequence
  Targeting domain
caaacaggagauacucaacaca

SEQ ID NO: 2280 - RNA, 18 nt, Artificial Sequence
  Targeting domain
caggagauacucaacaca

SEQ ID NO: 2281 - RNA, 21 nt, Artificial Sequence
  Targeting domain
cacguacaaaagaacauacau

SEQ ID NO: 2282 - RNA, 19 nt, Artificial Sequence
  Targeting domain
cguacaaaagaacauacau

SEQ ID NO: 2283 - skipped

SEQ ID NO: 2284 - RNA, 19 nt, Artificial Sequence
  Targeting domain
cuuuugacaguuuuuaagg

SEQ ID NO: 2285 - RNA, 19 nt, Artificial Sequence
  Targeting domain
cgugcucuuuucuauauau

SEQ ID NO: 2286 - RNA, 19 nt, Artificial Sequence
  Targeting domain
cacugagcaaaacaacugg

SEQ ID NO: 2287 - RNA, 24 nt, Artificial Sequence
  Targeting domain
ccugaacaaguuuugaaacaggaa

SEQ ID NO: 2288 - RNA, 23 nt, Artificial Sequence
  Targeting domain
cugaacaaguuuugaaacaggaa

SEQ ID NO: 2289 - RNA, 18 nt, Artificial Sequence
  Targeting domain
caaguuuugaaacaggaa

SEQ ID NO: 2290 - RNA, 18 nt, Artificial Sequence
  Targeting domain
ccugaacaaguuuugaaa

SEQ ID NO: 2291 - RNA, 21 nt, Artificial Sequence
  Targeting domain
cacugagcaaaacaacuggaa

SEQ ID NO: 2292 - RNA, 19 nt, Artificial Sequence
  Targeting domain
cugagcaaaacaacuggaa

SEQ ID NO: 2293 - RNA, 18 nt, Artificial Sequence
  Targeting domain
cgugcucuuuucuauaua

SEQ ID NO: 2294 - RNA, 18 nt, Artificial Sequence
  Targeting domain
cuauuccauucuucacac

SEQ ID NO: 2295 - RNA, 22 nt, Artificial Sequence
  Targeting domain
cuuaggaaauuauuguugcuuu

SEQ ID NO: 2296 - RNA, 21 nt, Artificial Sequence
  CEP290-1488 targeting domain (RNA)
cuuuuugagagguaaagguuc

SEQ ID NO: 2297 - RNA, 23 nt, Artificial Sequence
  Targeting domain
cacugagcaaaacaacuggaaga

SEQ ID NO: 2298 - RNA, 21 nt, Artificial Sequence
  Targeting domain
cugagcaaaacaacuggaaga

SEQ ID NO: 2299 - RNA, 21 nt, Artificial Sequence
  Targeting domain
cauaagaaagaacacuguggu

SEQ ID NO: 2300 - RNA, 18 nt, Artificial Sequence
  CEP290-1492 targeting domain (RNA)
cuugaaauuugauaguag

SEQ ID NO: 2301 - skipped

SEQ ID NO: 2302 - RNA, 19 nt, Artificial Sequence
  Targeting domain
cauuaaaaaaaguaugcuu

SEQ ID NO: 2303 - skipped

SEQ ID NO: 2304 - RNA, 19 nt, Artificial Sequence
  Targeting domain
cagauuucaugugugaaga

SEQ ID NO: 2305 - RNA, 20 nt, Artificial Sequence
  Targeting domain
cuggauggguaauaaagcaa

SEQ ID NO: 2306 - RNA, 19 nt, Artificial Sequence
  Targeting domain
cuuaagcauacuuuuuuua

SEQ ID NO: 2307 - RNA, 21 nt, Artificial Sequence
  Targeting domain
cuuuuuuuguuguuuuuuuuu

SEQ ID NO: 2308 - RNA, 24 nt, Artificial Sequence
  Targeting domain
cugcacuccagccugggcaacaca

SEQ ID NO: 2309 - RNA, 21 nt, Artificial Sequence
  Targeting domain
cacuccagccugggcaacaca

SEQ ID NO: 2310 - RNA, 19 nt, Artificial Sequence
  Targeting domain
cuccagccugggcaacaca

SEQ ID NO: 2311 - RNA, 21 nt, Artificial Sequence
  Targeting domain
guuuuuaaggcggggagucac

SEQ ID NO: 2312 - RNA, 22 nt, Artificial Sequence
  CEP290-232 targeting domain (RNA)
ggcacagaguucaagcuaauac

SEQ ID NO: 2313 - RNA, 21 nt, Artificial Sequence
  Targeting domain
gcacagaguucaagcuaauac

SEQ ID NO: 2314 - RNA, 24 nt, Artificial Sequence
  Targeting domain
gcauguggugucaaauauggugcu

SEQ ID NO: 2315 - skipped

SEQ ID NO: 2316 - RNA, 18 nt, Artificial Sequence
  Targeting domain
ggugucaaauauggugcu

SEQ ID NO: 2317 - RNA, 21 nt, Artificial Sequence
  Targeting domain
guggugucaaauauggugcuu

SEQ ID NO: 2318 - RNA, 19 nt, Artificial Sequence
  Targeting domain
ggugucaaauauggugcuu

SEQ ID NO: 2319 - RNA, 18 nt, Artificial Sequence
  Targeting domain
gugucaaauauggugcuu

SEQ ID NO: 2320 - RNA, 23 nt, Artificial Sequence
  Targeting domain
gcucuagaugacaugagguaagu

SEQ ID NO: 2321 - skipped

SEQ ID NO: 2322 - RNA, 20 nt, Artificial Sequence
  Targeting domain
gguucaugagacuagagguc

SEQ ID NO: 2323 - RNA, 19 nt, Artificial Sequence
  Targeting domain
guucaugagacuagagguc

SEQ ID NO: 2324 - RNA, 24 nt, Artificial Sequence
  Targeting domain
gccaaacaggagauacucaacaca

SEQ ID NO: 2325 - RNA, 24 nt, Artificial Sequence
  Targeting domain
gagcacguacaaaagaacauacau

SEQ ID NO: 2326 - RNA, 22 nt, Artificial Sequence
  Targeting domain
gcacguacaaaagaacauacau

SEQ ID NO: 2327 - RNA, 18 nt, Artificial Sequence
  Targeting domain
guacaaaagaacauacau

SEQ ID NO: 2328 - RNA, 24 nt, Artificial Sequence
  Targeting domain
guggcaguaaggaggauguaagac

SEQ ID NO: 2329 - RNA, 22 nt, Artificial Sequence
  Targeting domain
ggcaguaaggaggauguaagac

SEQ ID NO: 2330 - RNA, 21 nt, Artificial Sequence
  Targeting domain
gcaguaaggaggauguaagac

SEQ ID NO: 2331 - RNA, 18 nt, Artificial Sequence
  Targeting domain
guaaggaggauguaagac

SEQ ID NO: 2332 - RNA, 24 nt, Artificial Sequence
  Targeting domain
gguagcuuuugacaguuuuuaagg

SEQ ID NO: 2333 - RNA, 23 nt, Artificial Sequence
  Targeting domain
guagcuuuugacaguuuuuaagg

SEQ ID NO: 2334 - RNA, 22 nt, Artificial Sequence
  Targeting domain
guacgugcucuuuucuauauau

SEQ ID NO: 2335 - RNA, 18 nt, Artificial Sequence
  Targeting domain
gugcucuuuucuauauau

SEQ ID NO: 2336 - RNA, 21 nt, Artificial Sequence
  Targeting domain
gaacaaguuuugaaacaggaa

SEQ ID NO: 2337 - RNA, 24 nt, Artificial Sequence
  Targeting domain
guaaugccugaacaaguuuugaaa

SEQ ID NO: 2338 - RNA, 19 nt, Artificial Sequence
  Targeting domain
gccugaacaaguuuugaaa

SEQ ID NO: 2339 - RNA, 19 nt, Artificial Sequence
  Targeting domain
gguaaugccugaacaaguu

SEQ ID NO: 2340 - RNA, 18 nt, Artificial Sequence
  Targeting domain
guaaugccugaacaaguu

SEQ ID NO: 2341 - RNA, 21 nt, Artificial Sequence
  Targeting domain
guacgugcucuuuucuauaua

SEQ ID NO: 2342 - RNA, 22 nt, Artificial Sequence
  Targeting domain
gagagaaaugguucccuauaua

SEQ ID NO: 2343 - skipped

SEQ ID NO: 2344 - RNA, 18 nt, Artificial Sequence
  Targeting domain
gaaaugguucccuauaua

SEQ ID NO: 2345 - RNA, 23 nt, Artificial Sequence
  Targeting domain
gcuuaggaaauuauuguugcuuu

SEQ ID NO: 2346 - RNA, 18 nt, Artificial Sequence
  Targeting domain
ggaaauuauuguugcuuu

SEQ ID NO: 2347 - RNA, 22 nt, Artificial Sequence
  Targeting domain
gcuuuuugagagguaaagguuc

SEQ ID NO: 2348 - RNA, 19 nt, Artificial Sequence
  Targeting domain
gagcaaaacaacuggaaga

SEQ ID NO: 2349 - RNA, 23 nt, Artificial Sequence
  Targeting domain
gugugaagaauggaauagauaau

SEQ ID NO: 2350 - RNA, 21 nt, Artificial Sequence
  Targeting domain
gugaagaauggaauagauaau

SEQ ID NO: 2351 - RNA, 19 nt, Artificial Sequence
  Targeting domain
gaagaauggaauagauaau

SEQ ID NO: 2352 - RNA, 24 nt, Artificial Sequence
  Targeting domain
guaaggaggauguaagacuggaga

SEQ ID NO: 2353 - skipped

SEQ ID NO: 2354 - RNA, 19 nt, Artificial Sequence
  Targeting domain
gaggauguaagacuggaga

SEQ ID NO: 2355 - RNA, 24 nt, Artificial Sequence
  Targeting domain
gaaaaacuugaaauuugauaguag

SEQ ID NO: 2356 - RNA, 24 nt, Artificial Sequence
  Targeting domain
guguuuacauaucugucuuccuua

SEQ ID NO: 2357 - RNA, 22 nt, Artificial Sequence
  Targeting domain
guuuacauaucugucuuccuua

SEQ ID NO: 2358 - RNA, 23 nt, Artificial Sequence
  Targeting domain
guuccauuaaaaaaaguaugcuu

SEQ ID NO: 2359 - RNA, 21 nt, Artificial Sequence
  Targeting domain
ggaauauaagucuuuugauau

SEQ ID NO: 2360 - skipped

SEQ ID NO: 2361 - RNA, 24 nt, Artificial Sequence
  Targeting domain
gugugaagaauggaauagauaaua

SEQ ID NO: 2362 - RNA, 22 nt, Artificial Sequence
  Targeting domain
gugaagaauggaauagauaaua

SEQ ID NO: 2363 - RNA, 18 nt, Artificial Sequence
  Targeting domain
ggauggguaauaaagcaa

SEQ ID NO: 2364 - RNA, 21 nt, Artificial Sequence
  Targeting domain
gaaauucacugagcaaaacaa

SEQ ID NO: 2365 - RNA, 23 nt, Artificial Sequence
  CEP290-1557 targeting domain (RNA)
ggauguaagacuggagauagaga

SEQ ID NO: 2366 - RNA, 22 nt, Artificial Sequence
  CEP290-1558 targeting domain (RNA)
gauguaagacuggagauagaga

SEQ ID NO: 2367 - RNA, 19 nt, Artificial Sequence
  CEP290-1559 targeting domain (RNA)
guaagacuggagauagaga

SEQ ID NO: 2368 - RNA, 22 nt, Artificial Sequence
  CEP290-1560 targeting domain
gaaauuugauaguagaagaaaa

SEQ ID NO: 2369 - RNA, 23 nt, Artificial Sequence
  CEP290-1561 targeting domain
ggguaauaaagcaaaagaaaaac

SEQ ID NO: 2370 - RNA, 22 nt, Artificial Sequence
  CEP290-1562 targeting domain (RNA)
gguaauaaagcaaaagaaaaac

SEQ ID NO: 2371 - RNA, 21 nt, Artificial Sequence
  Targeting domain
guaauaaagcaaaagaaaaac

SEQ ID NO: 2372 - RNA, 22 nt, Artificial Sequence
  Targeting domain
gcacuccagccugggcaacaca

SEQ ID NO: 2373 - RNA, 24 nt, Artificial Sequence
  CEP290-1565 targeting domain
uacuuaccucaugucaucuagagc

SEQ ID NO: 2374 - RNA, 21 nt, Artificial Sequence
  Targeting domain
uuaccucaugucaucuagagc

SEQ ID NO: 2375-2376 - skipped (2 entries)

SEQ ID NO: 2377 - RNA, 19 nt, Artificial Sequence
  Targeting domain
uuuuaaggcggggagucac

SEQ ID NO: 2378 - RNA, 18 nt, Artificial Sequence
  Targeting domain
uuuaaggcggggagucac

SEQ ID NO: 2379 - RNA, 24 nt, Artificial Sequence
  Targeting domain
uuggcacagaguucaagcuaauac

SEQ ID NO: 2380 - RNA, 23 nt, Artificial Sequence
  Targeting domain
uggcacagaguucaagcuaauac

SEQ ID NO: 2381 - RNA, 23 nt, Artificial Sequence
  Targeting domain
uuagcuugaacucugugccaaac

SEQ ID NO: 2382 - RNA, 22 nt, Artificial Sequence
  Targeting domain
uagcuugaacucugugccaaac

SEQ ID NO: 2383 - RNA, 18 nt, Artificial Sequence
  Targeting domain
uugaacucugugccaaac

SEQ ID NO: 2384 - RNA, 21 nt, Artificial Sequence
  CEP290-1576 targeting domain
uguggugucaaauauggugcu

SEQ ID NO: 2385 - RNA, 19 nt, Artificial Sequence
  Targeting domain
uggugucaaauauggugcu

SEQ ID NO: 2386 - RNA, 22 nt, Artificial Sequence
  Targeting domain
uguggugucaaauauggugcuu

SEQ ID NO: 2387 - skipped

SEQ ID NO: 2388 - RNA, 24 nt, Artificial Sequence
  Targeting domain
ugcucuagaugacaugagguaagu

SEQ ID NO: 2389 - RNA, 21 nt, Artificial Sequence
  Targeting domain
ucuagaugacaugagguaagu

SEQ ID NO: 2390 - RNA, 19 nt, Artificial Sequence
  Targeting domain
uagaugacaugagguaagu

SEQ ID NO: 2391 - RNA, 23 nt, Artificial Sequence
  Targeting domain
uaauacaugagagugauuagugg

SEQ ID NO: 2392 - RNA, 24 nt, Artificial Sequence
  Targeting domain
uaaagguucaugagacuagagguc

SEQ ID NO: 2393 - RNA, 18 nt, Artificial Sequence
  Targeting domain
uucaugagacuagagguc

SEQ ID NO: 2394 - RNA, 23 nt, Artificial Sequence
  Targeting domain
uggcaguaaggaggauguaagac

SEQ ID NO: 2395 - RNA, 22 nt, Artificial Sequence
  Targeting domain
uagcuuuugacaguuuuuaagg

SEQ ID NO: 2396 - RNA, 18 nt, Artificial Sequence
  Targeting domain
uuuugacaguuuuuaagg

SEQ ID NO: 2397 - RNA, 24 nt, Artificial Sequence
  Targeting domain
uuguacgugcucuuuucuauauau

SEQ ID NO: 2398 - RNA, 23 nt, Artificial Sequence
  Targeting domain
uguacgugcucuuuucuauauau

SEQ ID NO: 2399 - RNA, 21 nt, Artificial Sequence
  CEP290-1592 targeting domain
uacgugcucuuuucuauauau

SEQ ID NO: 2400 - RNA, 21 nt, Artificial Sequence
  Targeting domain
uucacugagcaaaacaacugg

SEQ ID NO: 2401 - skipped

SEQ ID NO: 2402 - RNA, 22 nt, Artificial Sequence
  Targeting domain
ugaacaaguuuugaaacaggaa

SEQ ID NO: 2403 - RNA, 23 nt, Artificial Sequence
  Targeting domain
uaaugccugaacaaguuuugaaa

SEQ ID NO: 2404 - skipped

SEQ ID NO: 2405 - RNA, 23 nt, Artificial Sequence
  Targeting domain
uucacugagcaaaacaacuggaa

SEQ ID NO: 2406 - RNA, 22 nt, Artificial Sequence
  Targeting domain
ucacugagcaaaacaacuggaa

SEQ ID NO: 2407 - RNA, 18 nt, Artificial Sequence
  Targeting domain
ugagcaaaacaacuggaa

SEQ ID NO: 2408 - RNA, 24 nt, Artificial Sequence
  CEP290-1601 targeting domain
uuuguacgugcucuuuucuauaua

SEQ ID NO: 2409 - RNA, 23 nt, Artificial Sequence
  Targeting domain
uuguacgugcucuuuucuauaua

SEQ ID NO: 2410 - RNA, 22 nt, Artificial Sequence
  Targeting domain
uguacgugcucuuuucuauaua

SEQ ID NO: 2411 - skipped

SEQ ID NO: 2412 - RNA, 24 nt, Artificial Sequence
  Targeting domain
uauuaucuauuccauucuucacac

SEQ ID NO: 2413 - RNA, 22 nt, Artificial Sequence
  Targeting domain
uuaucuauuccauucuucacac

SEQ ID NO: 2414 - RNA, 21 nt, Artificial Sequence
  Targeting domain
uaucuauuccauucuucacac

SEQ ID NO: 2415 - RNA, 19 nt, Artificial Sequence
  Targeting domain
ucuauuccauucuucacac

SEQ ID NO: 2416 - RNA, 24 nt, Artificial Sequence
  Targeting domain
ugcuuaggaaauuauuguugcuuu

SEQ ID NO: 2417 - RNA, 21 nt, Artificial Sequence
  Targeting domain
uuaggaaauuauuguugcuuu

SEQ ID NO: 2418 - RNA, 20 nt, Artificial Sequence
  Targeting domain
uaggaaauuauuguugcuuu

SEQ ID NO: 2419 - RNA, 24 nt, Artificial Sequence
  Targeting domain
uugcuuuuugagagguaaagguuc

SEQ ID NO: 2420 - RNA, 23 nt, Artificial Sequence
  Targeting domain
ugcuuuuugagagguaaagguuc

SEQ ID NO: 2421 - RNA, 20 nt, Artificial Sequence
  Targeting domain
uuuuugagagguaaagguuc

SEQ ID NO: 2422 - RNA, 19 nt, Artificial Sequence
  Targeting domain
uuuugagagguaaagguuc

SEQ ID NO: 2423 - RNA, 18 nt, Artificial Sequence
  Targeting domain
uuugagagguaaagguuc

SEQ ID NO: 2424 - RNA, 24 nt, Artificial Sequence
  Targeting domain
ucacugagcaaaacaacuggaaga

SEQ ID NO: 2425 - skipped

SEQ ID NO: 2426 - RNA, 23 nt, Artificial Sequence
  Targeting domain
uacauaagaaagaacacuguggu

SEQ ID NO: 2427 - RNA, 19 nt, Artificial Sequence
  Targeting domain
uaagaaagaacacuguggu

SEQ ID NO: 2428 - RNA, 24 nt, Artificial Sequence
  Targeting domain
ugugugaagaauggaauagauaau

SEQ ID NO: 2429 - RNA, 22 nt, Artificial Sequence
  Targeting domain
ugugaagaauggaauagauaau

SEQ ID NO: 2430 - RNA, 20 nt, Artificial Sequence
  Targeting domain
ugaagaauggaauagauaau

SEQ ID NO: 2431 - RNA, 23 nt, Artificial Sequence
  Targeting domain
uaaggaggauguaagacuggaga

SEQ ID NO: 2432 - RNA, 23 nt, Artificial Sequence
  Targeting domain
uguuuacauaucugucuuccuua

SEQ ID NO: 2433 - RNA, 21 nt, Artificial Sequence
  Targeting domain
uuuacauaucugucuuccuua

SEQ ID NO: 2434 - skipped

SEQ ID NO: 2435 - RNA, 19 nt, Artificial Sequence
  Targeting domain
uacauaucugucuuccuua

SEQ ID NO: 2436 - RNA, 24 nt, Artificial Sequence
  Targeting domain
uguuccauuaaaaaaaguaugcuu

SEQ ID NO: 2437 - RNA, 22 nt, Artificial Sequence
  Targeting domain
uuccauuaaaaaaaguaugcuu

SEQ ID NO: 2438 - RNA, 21 nt, Artificial Sequence
  Targeting domain
uccauuaaaaaaaguaugcuu

SEQ ID NO: 2439 - RNA, 23 nt, Artificial Sequence
  CEP290-1632 targeting domain (RNA)
uaucaaaagacuuauauuccauu

SEQ ID NO: 2440 - RNA, 21 nt, Artificial Sequence
  Targeting domain
ucaaaagacuuauauuccauu

SEQ ID NO: 2441 - RNA, 20 nt, Artificial Sequence
  Targeting domain
ucagauuucaugugugaaga

SEQ ID NO: 2442 - RNA, 22 nt, Artificial Sequence
  Targeting domain
uggaauauaagucuuuugauau

SEQ ID NO: 2443 - RNA, 23 nt, Artificial Sequence
  Targeting domain
ugugaagaauggaauagauaaua

SEQ ID NO: 2444 - RNA, 21 nt, Artificial Sequence
  Targeting domain
ugaagaauggaauagauaaua

SEQ ID NO: 2445 - RNA, 19 nt, Artificial Sequence
  Targeting domain
uggauggguaauaaagcaa

SEQ ID NO: 2446 - RNA, 23 nt, Artificial Sequence
  CEP290-1639 targeting domain (RNA)
uagaaauucacugagcaaaacaa

SEQ ID NO: 2447 - skipped

SEQ ID NO: 2448 - RNA, 18 nt, Artificial Sequence
  CEP290-1641 targeting domain (RNA)
uaagacuggagauagaga

SEQ ID NO: 2449 - RNA, 24 nt, Artificial Sequence
  Targeting domain
uugaaauuugauaguagaagaaaa

SEQ ID NO: 2450 - RNA, 23 nt, Artificial Sequence
  Targeting domain
ugaaauuugauaguagaagaaaa

SEQ ID NO: 2451 - RNA, 18 nt, Artificial Sequence
  Targeting domain
uuugauaguagaagaaaa

SEQ ID NO: 2452 - skipped

SEQ ID NO: 2453 - RNA, 24 nt, Artificial Sequence
  CEP290-1646 targeting domain (RNA)
uuuuucuuaagcauacuuuuuuua

SEQ ID NO: 2454 - RNA, 23 nt, Artificial Sequence
  Targeting domain
uuuucuuaagcauacuuuuuuua

SEQ ID NO: 2455 - RNA, 22 nt, Artificial Sequence
  Targeting domain
uuucuuaagcauacuuuuuuua

SEQ ID NO: 2456 - RNA, 21 nt, Artificial Sequence
  Targeting domain
uucuuaagcauacuuuuuuua

SEQ ID NO: 2457 - skipped

SEQ ID NO: 2458 - RNA, 18 nt, Artificial Sequence
  Targeting domain
uuaagcauacuuuuuuua

SEQ ID NO: 2459 - RNA, 24 nt, Artificial Sequence
  Targeting domain
uggguaauaaagcaaaagaaaaac

SEQ ID NO: 2460 - RNA, 20 nt, Artificial Sequence
  CEP290-1653 targeting domain (RNA)
uaauaaagcaaaagaaaaac

SEQ ID NO: 2461 - RNA, 23 nt, Artificial Sequence
  Targeting domain
uucuuuuuuuguuguuuuuuuuu

SEQ ID NO: 2462 - RNA, 22 nt, Artificial Sequence
  Targeting domain
ucuuuuuuuguuguuuuuuuuu

SEQ ID NO: 2463 - RNA, 20 nt, Artificial Sequence
  Targeting domain
uuuuuuuguuguuuuuuuuu

SEQ ID NO: 2464 - RNA, 19 nt, Artificial Sequence
  Targeting domain
uuuuuuguuguuuuuuuuu

SEQ ID NO: 2465 - RNA, 18 nt, Artificial Sequence
  CEP290-1658 targeting domain (RNA)
uuuuuguuguuuuuuuuu

SEQ ID NO: 2466 - RNA, 23 nt, Artificial Sequence
  Targeting domain
ugcacuccagccugggcaacaca

SEQ ID NO: 2467 - RNA, 18 nt, Artificial Sequence
  Targeting domain
uccagccugggcaacaca

SEQ ID NO: 2468 - RNA, 21 nt, Artificial Sequence
  CEP290-1661 targeting domain (RNA)
auuuucgugaccucuagucuc

SEQ ID NO: 2469 - RNA, 23 nt, Artificial Sequence
  CEP290-1662 targeting domain (RNA)
acuaaucacucucauguauuagc

SEQ ID NO: 2470 - skipped

SEQ ID NO: 2471 - RNA, 19 nt, Artificial Sequence
  Targeting domain
aucacucucauguauuagc

SEQ ID NO: 2472 - RNA, 19 nt, Artificial Sequence
  Targeting domain
agaugacaugagguaagua

SEQ ID NO: 2473 - RNA, 24 nt, Artificial Sequence
  Targeting domain
accucaugucaucuagagcaagag

SEQ ID NO: 2474 - RNA, 19 nt, Artificial Sequence
  Targeting domain
augucaucuagagcaagag

SEQ ID NO: 2475 - RNA, 24 nt, Artificial Sequence
  CEP290-1668 targeting domain (RNA)
aauacaugagagugauuaguggug

SEQ ID NO: 2476 - RNA, 23 nt, Artificial Sequence
  CEP290-1669 targeting domain (RNA)
auacaugagagugauuaguggug

SEQ ID NO: 2477 - RNA, 21 nt, Artificial Sequence
  Targeting domain
acaugagagugauuaguggug

SEQ ID NO: 2478 - RNA, 19 nt, Artificial Sequence
  Targeting domain
augagagugauuaguggug

SEQ ID NO: 2479 - RNA, 21 nt, Artificial Sequence
  Targeting domain
acgugcucuuuucuauauaua

SEQ ID NO: 2480 - RNA, 21 nt, Artificial Sequence
  Targeting domain
acaaaaccuauguauaagaug

SEQ ID NO: 2481 - RNA, 19 nt, Artificial Sequence
  Targeting domain
aaaaccuauguauaagaug

SEQ ID NO: 2482 - RNA, 18 nt, Artificial Sequence
  Targeting domain
aaaccuauguauaagaug

SEQ ID NO: 2483 - RNA, 24 nt, Artificial Sequence
  Targeting domain
auauauagaaaagagcacguacaa

SEQ ID NO: 2484 - RNA, 22 nt, Artificial Sequence
  CEP290-1677 targeting domain (RNA)
auauagaaaagagcacguacaa

SEQ ID NO: 2485 - skipped

SEQ ID NO: 2486 - RNA, 18 nt, Artificial Sequence
  Targeting domain
agaaaagagcacguacaa

SEQ ID NO: 2487 - RNA, 24 nt, Artificial Sequence
  Targeting domain
agaaaugguucccuauauauagaa

SEQ ID NO: 2488 - RNA, 22 nt, Artificial Sequence
  Targeting domain
aaaugguucccuauauauagaa

SEQ ID NO: 2489 - RNA, 21 nt, Artificial Sequence
  Targeting domain
aaugguucccuauauauagaa

SEQ ID NO: 2490 - skipped

SEQ ID NO: 2491 - RNA, 24 nt, Artificial Sequence
  CEP290-1684 targeting domain (RNA)
auggaauauaagucuuuugauaua

SEQ ID NO: 2492 - skipped

SEQ ID NO: 2493 - RNA, 19 nt, Artificial Sequence
  CEP290-1686 targeting domain (RNA)
auauaagucuuuugauaua

SEQ ID NO: 2494 - RNA, 24 nt, Artificial Sequence
  CEP290-1687 targeting domain (RNA)
acguacaaaagaacauacauaaga

SEQ ID NO: 2495 - skipped

SEQ ID NO: 2496 - RNA, 18 nt, Artificial Sequence
  CEP290-1689 targeting domain (RNA)
aaaagaacauacauaaga

SEQ ID NO: 2497 - RNA, 19 nt, Artificial Sequence
  Targeting domain
aagaaaaaaaagguaaugc

SEQ ID NO: 2498 - RNA, 18 nt, Artificial Sequence
  Targeting domain
agaaaaaaaagguaaugc

SEQ ID NO: 2499 - RNA, 19 nt, Artificial Sequence
  Targeting domain
aaacaggaauagaaauuca

SEQ ID NO: 2500 - RNA, 18 nt, Artificial Sequence
  CEP290-1693 targeting domain (RNA)
aacaggaauagaaauuca

SEQ ID NO: 2501 - RNA, 24 nt, Artificial Sequence
  Targeting domain
aagaucacuccacugcacuccagc

SEQ ID NO: 2502 - RNA, 23 nt, Artificial Sequence
  Targeting domain
agaucacuccacugcacuccagc

SEQ ID NO: 2503 - RNA, 21 nt, Artificial Sequence
  Targeting domain
aucacuccacugcacuccagc

SEQ ID NO: 2504 - RNA, 18 nt, Artificial Sequence
  Targeting domain
acuccacugcacuccagc

SEQ ID NO: 2505 - RNA, 22 nt, Artificial Sequence
  CEP290-1698 targeting domain (RNA)
ccccuacuuaccucaugucauc

SEQ ID NO: 2506 - RNA, 21 nt, Artificial Sequence
  Targeting domain
cccuacuuaccucaugucauc

SEQ ID NO: 2507 - skipped

SEQ ID NO: 2508 - RNA, 19 nt, Artificial Sequence
  CEP290-1701 targeting domain (RNA)
cuacuuaccucaugucauc

SEQ ID NO: 2509 - RNA, 24 nt, Artificial Sequence
  CEP290-1702 targeting domain (RNA)
cugauuuucgugaccucuagucuc

SEQ ID NO: 2510 - RNA, 24 nt, Artificial Sequence
  CEP290-1703 targeting domain (RNA)
cacuaaucacucucauguauuagc

SEQ ID NO: 2511 - RNA, 22 nt, Artificial Sequence
  CEP290-1704 targeting domain (RNA)
cuaaucacucucauguauuagc

SEQ ID NO: 2512 - RNA, 23 nt, Artificial Sequence
  Targeting domain
cucuagaugacaugagguaagua

SEQ ID NO: 2513 - RNA, 21 nt, Artificial Sequence
  CEP290-1706 targeting domain (RNA)
cuagaugacaugagguaagua

SEQ ID NO: 2514 - RNA, 23 nt, Artificial Sequence
  Targeting domain
ccucaugucaucuagagcaagag

SEQ ID NO: 2515 - RNA, 22 nt, Artificial Sequence
  Targeting domain
cucaugucaucuagagcaagag

SEQ ID NO: 2516-2519 - skipped (4 entries)

SEQ ID NO: 2520 - RNA, 23 nt, Artificial Sequence
  Targeting domain
cguacaaaagaacauacauaaga

SEQ ID NO: 2521 - RNA, 19 nt, Artificial Sequence
  Targeting domain
caaaagaacauacauaaga

SEQ ID NO: 2522 - RNA, 22 nt, Artificial Sequence
  Targeting domain
cuuaagaaaaaaaagguaaugc

SEQ ID NO: 2523 - skipped

SEQ ID NO: 2524 - RNA, 19 nt, Artificial Sequence
  Targeting domain
cacuccacugcacuccagc

SEQ ID NO: 2525 - RNA, 24 nt, Artificial Sequence
  CEP290-132 targeting domain (RNA)
guccccuacuuaccucaugucauc

SEQ ID NO: 2526 - RNA, 22 nt, Artificial Sequence
  Targeting domain
gauuuucgugaccucuagucuc

SEQ ID NO: 2527 - RNA, 24 nt, Artificial Sequence
  Targeting domain
gcucuagaugacaugagguaagua

SEQ ID NO: 2528 - RNA, 18 nt, Artificial Sequence
  Targeting domain
gaugacaugagguaagua

SEQ ID NO: 2529 - RNA, 23 nt, Artificial Sequence
  Targeting domain
guacgugcucuuuucuauauaua

SEQ ID NO: 2530 - RNA, 19 nt, Artificial Sequence
  Targeting domain
gugcucuuuucuauauaua

SEQ ID NO: 2531 - RNA, 23 nt, Artificial Sequence
  CEP290-1723 targeting domain (RNA)
guacaaaaccuauguauaagaug

SEQ ID NO: 2532 - RNA, 23 nt, Artificial Sequence
  Targeting domain
gaaaugguucccuauauauagaa

SEQ ID NO: 2533 - RNA, 18 nt, Artificial Sequence
  Targeting domain
gguucccuauauauagaa

SEQ ID NO: 2534 - RNA, 22 nt, Artificial Sequence
  Targeting domain
ggaauauaagucuuuugauaua

SEQ ID NO: 2535 - RNA, 21 nt, Artificial Sequence
  Targeting domain
gaauauaagucuuuugauaua

SEQ ID NO: 2536 - RNA, 22 nt, Artificial Sequence
  Targeting domain
guacaaaagaacauacauaaga

SEQ ID NO: 2537 - RNA, 23 nt, Artificial Sequence
  Targeting domain
gcuuaagaaaaaaaagguaaugc

SEQ ID NO: 2538 - skipped

SEQ ID NO: 2539 - RNA, 22 nt, Artificial Sequence
  Targeting domain
gaucacuccacugcacuccagc

SEQ ID NO: 2540 - RNA, 23 nt, Artificial Sequence
  Targeting domain
uccccuacuuaccucaugucauc

SEQ ID NO: 2541 - RNA, 18 nt, Artificial Sequence
  CEP290-1733 targeting domain (RNA)
uacuuaccucaugucauc

SEQ ID NO: 2542 - RNA, 23 nt, Artificial Sequence
  Targeting domain
ugauuuucgugaccucuagucuc

SEQ ID NO: 2543 - RNA, 20 nt, Artificial Sequence
  Targeting domain
uuuucgugaccucuagucuc

SEQ ID NO: 2544 - RNA, 19 nt, Artificial Sequence
  Targeting domain
uuucgugaccucuagucuc

SEQ ID NO: 2545 - RNA, 18 nt, Artificial Sequence
  Targeting domain
uucgugaccucuagucuc

SEQ ID NO: 2546 - RNA, 21 nt, Artificial Sequence
  Targeting domain
uaaucacucucauguauuagc

SEQ ID NO: 2547 - RNA, 18 nt, Artificial Sequence
  CEP290-1739 targeting domain (RNA)
ucacucucauguauuagc

SEQ ID NO: 2548 - RNA, 22 nt, Artificial Sequence
  Targeting domain
ucuagaugacaugagguaagua

SEQ ID NO: 2549 - skipped

SEQ ID NO: 2550 - RNA, 21 nt, Artificial Sequence
  Targeting domain
ucaugucaucuagagcaagag

SEQ ID NO: 2551 - RNA, 18 nt, Artificial Sequence
  Targeting domain
ugucaucuagagcaagag

SEQ ID NO: 2552 - RNA, 22 nt, Artificial Sequence
  Targeting domain
uacaugagagugauuaguggug

SEQ ID NO: 2553 - RNA, 18 nt, Artificial Sequence
  Targeting domain
ugagagugauuaguggug

SEQ ID NO: 2554 - RNA, 24 nt, Artificial Sequence
  Targeting domain
uguacgugcucuuuucuauauaua

SEQ ID NO: 2555 - RNA, 22 nt, Artificial Sequence
  Targeting domain
uacgugcucuuuucuauauaua

SEQ ID NO: 2556 - RNA, 18 nt, Artificial Sequence
  Targeting domain
ugcucuuuucuauauaua

SEQ ID NO: 2557 - RNA, 24 nt, Artificial Sequence
  Targeting domain
uguacaaaaccuauguauaagaug

SEQ ID NO: 2558 - RNA, 22 nt, Artificial Sequence
  CEP290-1750 targeting domain (RNA)
uacaaaaccuauguauaagaug

SEQ ID NO: 2559 - RNA, 23 nt, Artificial Sequence
  Targeting domain
uauauagaaaagagcacguacaa

SEQ ID NO: 2560 - RNA, 21 nt, Artificial Sequence
  Targeting domain
uauagaaaagagcacguacaa

SEQ ID NO: 2561 - RNA, 19 nt, Artificial Sequence
  Targeting domain
uagaaaagagcacguacaa

SEQ ID NO: 2562 - RNA, 19 nt, Artificial Sequence
  Targeting domain
ugguucccuauauauagaa

SEQ ID NO: 2563 - RNA, 23 nt, Artificial Sequence
  Targeting domain
uggaauauaagucuuuugauaua

SEQ ID NO: 2564 - RNA, 18 nt, Artificial Sequence
  Targeting domain
uauaagucuuuugauaua

SEQ ID NO: 2565 - RNA, 21 nt, Artificial Sequence
  Targeting domain
uacaaaagaacauacauaaga

SEQ ID NO: 2566 - RNA, 24 nt, Artificial Sequence
  CEP290-1758 targeting domain (RNA)
ugcuuaagaaaaaaaagguaaugc

SEQ ID NO: 2567 - RNA, 21 nt, Artificial Sequence
  Targeting domain
uuaagaaaaaaaagguaaugc

SEQ ID NO: 2568 - skipped

SEQ ID NO: 2569 - RNA, 24 nt, Artificial Sequence
  Targeting domain
uuuugaaacaggaauagaaauuca

SEQ ID NO: 2570 - RNA, 23 nt, Artificial Sequence
  Targeting domain
uuugaaacaggaauagaaauuca

SEQ ID NO: 2571 - RNA, 22 nt, Artificial Sequence
  Targeting domain
uugaaacaggaauagaaauuca

SEQ ID NO: 2572 - RNA, 21 nt, Artificial Sequence
  Targeting domain
ugaaacaggaauagaaauuca

SEQ ID NO: 2573 - RNA, 24 nt, Artificial Sequence
  Targeting domain
uuuucuuaagcauacuuuuuuuaa

SEQ ID NO: 2574 - RNA, 23 nt, Artificial Sequence
  Targeting domain
uuucuuaagcauacuuuuuuuaa

SEQ ID NO: 2575 - RNA, 22 nt, Artificial Sequence
  Targeting domain
uucuuaagcauacuuuuuuuaa

SEQ ID NO: 2576 - RNA, 21 nt, Artificial Sequence
  CEP290-1768 targeting domain (RNA)
ucuuaagcauacuuuuuuuaa

SEQ ID NO: 2577 - RNA, 19 nt, Artificial Sequence
  Targeting domain
uuaagcauacuuuuuuuaa

SEQ ID NO: 2578 - RNA, 18 nt, Artificial Sequence
  Targeting domain
uaagcauacuuuuuuuaa

SEQ ID NO: 2579 - RNA, 20 nt, Artificial Sequence
  Targeting domain
ucacuccacugcacuccagc

SEQ ID NO: 2580 - RNA, 23 nt, Artificial Sequence
  CEP290-1772 targeting domain (RNA)
aguuuuuaaggcggggagucaca

SEQ ID NO: 2581 - RNA, 24 nt, Artificial Sequence
  Targeting domain
aaacugucaaaagcuaccgguuac

SEQ ID NO: 2582 - RNA, 23 nt, Artificial Sequence
  CEP290-1774 targeting domain (RNA)
aacugucaaaagcuaccgguuac

SEQ ID NO: 2583 - RNA, 22 nt, Artificial Sequence
  CEP290-252 targeting domain (RNA)
acugucaaaagcuaccgguuac

SEQ ID NO: 2584 - RNA, 24 nt, Artificial Sequence
  Targeting domain
aguucaucucuugcucuagaugac

SEQ ID NO: 2585 - RNA, 19 nt, Artificial Sequence
  Targeting domain
aucucuugcucuagaugac

SEQ ID NO: 2586 - RNA, 20 nt, Artificial Sequence
  Targeting domain
acgaaaaucagauuucaugu

SEQ ID NO: 2587 - RNA, 21 nt, Artificial Sequence
  CEP290-1778 targeting domain (RNA)
aauacaugagagugauuagug

SEQ ID NO: 2588 - skipped

SEQ ID NO: 2589 - RNA, 18 nt, Artificial Sequence
  CEP290-1780 targeting domain (RNA)
acaugagagugauuagug

SEQ ID NO: 2590 - RNA, 23 nt, Artificial Sequence
  CEP290-1781 targeting domain (RNA)
auuagcuugaacucugugccaaa

SEQ ID NO: 2591 - skipped

SEQ ID NO: 2592 - RNA, 23 nt, Artificial Sequence
  CEP290-1783 targeting domain (RNA)
auguagauugagguagaaucaag

SEQ ID NO: 2593 - RNA, 19 nt, Artificial Sequence
  CEP290-1784 targeting domain (RNA)
agauugagguagaaucaag

SEQ ID NO: 2594 - RNA, 23 nt, Artificial Sequence
  CEP290-1785 targeting domain (RNA)
auaagaugcagaacuaguguaga

SEQ ID NO: 2595 - RNA, 21 nt, Artificial Sequence
  CEP290-1786 targeting domain (RNA)
aagaugcagaacuaguguaga

SEQ ID NO: 2596 - skipped

SEQ ID NO: 2597 - RNA, 18 nt, Artificial Sequence
  CEP290-1788 targeting domain (RNA)
augcagaacuaguguaga

SEQ ID NO: 2598 - RNA, 24 nt, Artificial Sequence
  Targeting domain
auagauguagauugagguagaauc

SEQ ID NO: 2599 - RNA, 22 nt, Artificial Sequence
  Targeting domain
agauguagauugagguagaauc

SEQ ID NO: 2600 - RNA, 20 nt, Artificial Sequence
  Targeting domain
auguagauugagguagaauc

SEQ ID NO: 2601 - RNA, 24 nt, Artificial Sequence
  Targeting domain
agaaugaucauucuuguggcagua

SEQ ID NO: 2602 - RNA, 22 nt, Artificial Sequence
  Targeting domain
aaugaucauucuuguggcagua

SEQ ID NO: 2603 - RNA, 21 nt, Artificial Sequence
  Targeting domain
augaucauucuuguggcagua

SEQ ID NO: 2604 - RNA, 18 nt, Artificial Sequence
  Targeting domain
aucauucuuguggcagua

SEQ ID NO: 2605 - RNA, 23 nt, Artificial Sequence
  Targeting domain
agaaugaucauucuuguggcagu

SEQ ID NO: 2606 - RNA, 21 nt, Artificial Sequence
  Targeting domain
aaugaucauucuuguggcagu

SEQ ID NO: 2607 - skipped

SEQ ID NO: 2608 - RNA, 21 nt, Artificial Sequence
  Targeting domain
agagguaaagguucaugagac

SEQ ID NO: 2609 - RNA, 19 nt, Artificial Sequence
  Targeting domain
agguaaagguucaugagac

SEQ ID NO: 2610 - skipped

SEQ ID NO: 2611 - RNA, 22 nt, Artificial Sequence
  Targeting domain
agcuuuugacaguuuuuaaggc

SEQ ID NO: 2612 - RNA, 23 nt, Artificial Sequence
  Targeting domain
agaaauucacugagcaaaacaac

SEQ ID NO: 2613 - RNA, 21 nt, Artificial Sequence
  Targeting domain
aaauucacugagcaaaacaac

SEQ ID NO: 2614 - skipped

SEQ ID NO: 2615 - RNA, 19 nt, Artificial Sequence
  Targeting domain
auucacugagcaaaacaac

SEQ ID NO: 2616 - RNA, 18 nt, Artificial Sequence
  Targeting domain
aguaaggaggauguaaga

SEQ ID NO: 2617 - RNA, 23 nt, Artificial Sequence
  Targeting domain
aucaaaagacuuauauuccauua

SEQ ID NO: 2618 - skipped

SEQ ID NO: 2619 - RNA, 19 nt, Artificial Sequence
  Targeting domain
aaagacuuauauuccauua

SEQ ID NO: 2620 - RNA, 18 nt, Artificial Sequence
  Targeting domain
aagacuuauauuccauua

SEQ ID NO: 2621 - RNA, 21 nt, Artificial Sequence
  Targeting domain
aggaaauuauuguugcuuuuu

SEQ ID NO: 2622 - RNA, 18 nt, Artificial Sequence
  Targeting domain
aaauuauuguugcuuuuu

SEQ ID NO: 2623 - RNA, 24 nt, Artificial Sequence
  Targeting domain
aaagaaaaacuugaaauuugauag

SEQ ID NO: 2624 - RNA, 23 nt, Artificial Sequence
  Targeting domain
aagaaaaacuugaaauuugauag

SEQ ID NO: 2625 - RNA, 22 nt, Artificial Sequence
  Targeting domain
agaaaaacuugaaauuugauag

SEQ ID NO: 2626 - RNA, 20 nt, Artificial Sequence
  Targeting domain
aaaaacuugaaauuugauag

SEQ ID NO: 2627 - RNA, 19 nt, Artificial Sequence
  Targeting domain
aaaacuugaaauuugauag

SEQ ID NO: 2628 - RNA, 18 nt, Artificial Sequence
  Targeting domain
aaacuugaaauuugauag

SEQ ID NO: 2629 - RNA, 23 nt, Artificial Sequence
  Targeting domain
aagaaaaaagaaauagauguaga

SEQ ID NO: 2630 - RNA, 22 nt, Artificial Sequence
  Targeting domain
agaaaaaagaaauagauguaga

SEQ ID NO: 2631 - RNA, 20 nt, Artificial Sequence
  Targeting domain
aaaaaagaaauagauguaga

SEQ ID NO: 2632 - RNA, 19 nt, Artificial Sequence
  Targeting domain
aaaaagaaauagauguaga

SEQ ID NO: 2633 - RNA, 18 nt, Artificial Sequence
  Targeting domain
aaaagaaauagauguaga

SEQ ID NO: 2634 - RNA, 23 nt, Artificial Sequence
  Targeting domain
agagucucacuguguugcccagg

SEQ ID NO: 2635 - RNA, 21 nt, Artificial Sequence
  Targeting domain
agucucacuguguugcccagg

SEQ ID NO: 2636 - RNA, 24 nt, Artificial Sequence
  Targeting domain
caguuuuuaaggcggggagucaca

SEQ ID NO: 2637 - RNA, 21 nt, Artificial Sequence
  Targeting domain
cugucaaaagcuaccgguuac

SEQ ID NO: 2638 - skipped

SEQ ID NO: 2639 - RNA, 21 nt, Artificial Sequence
  Targeting domain
cacgaaaaucagauuucaugu

SEQ ID NO: 2640 - RNA, 19 nt, Artificial Sequence
  Targeting domain
cgaaaaucagauuucaugu

SEQ ID NO: 2641 - RNA, 23 nt, Artificial Sequence
  Targeting domain
cuaauacaugagagugauuagug

SEQ ID NO: 2642 - RNA, 18 nt, Artificial Sequence
  Targeting domain
cuugaacucugugccaaa

SEQ ID NO: 2643 - RNA, 21 nt, Artificial Sequence
  Targeting domain
cucuagaugacaugagguaag

SEQ ID NO: 2644 - RNA, 19 nt, Artificial Sequence
  Targeting domain
cuagaugacaugagguaag

SEQ ID NO: 2645 - RNA, 24 nt, Artificial Sequence
  Targeting domain
cgguagcuuuugacaguuuuuaag

SEQ ID NO: 2646 - RNA, 18 nt, Artificial Sequence
  Targeting domain
cuuuugacaguuuuuaag

SEQ ID NO: 2647 - skipped

SEQ ID NO: 2648 - RNA, 19 nt, Artificial Sequence
  Targeting domain
caguaaggaggauguaaga

SEQ ID NO: 2649 - RNA, 21 nt, Artificial Sequence
  Targeting domain
caaaagacuuauauuccauua

SEQ ID NO: 2650 - RNA, 24 nt, Artificial Sequence
  Targeting domain
cuuaggaaauuauuguugcuuuuu

SEQ ID NO: 2651 - RNA, 24 nt, Artificial Sequence
  Targeting domain
cuguguugcccaggcuggagugca

SEQ ID NO: 2652 - RNA, 24 nt, Artificial Sequence
  Targeting domain
cagagucucacuguguugcccagg

SEQ ID NO: 2653 - RNA, 18 nt, Artificial Sequence
  Targeting domain
cucacuguguugcccagg

SEQ ID NO: 2654 - RNA, 22 nt, Artificial Sequence
  Targeting domain
guuuuuaaggcggggagucaca

SEQ ID NO: 2655 - RNA, 19 nt, Artificial Sequence
  CEP290-1846 targeting domain (RNA)
gucaaaagcuaccgguuac

SEQ ID NO: 2656 - RNA, 23 nt, Artificial Sequence
  Targeting domain
guucaucucuugcucuagaugac

SEQ ID NO: 2657 - RNA, 24 nt, Artificial Sequence
  Targeting domain
ggucacgaaaaucagauuucaugu

SEQ ID NO: 2658 - RNA, 23 nt, Artificial Sequence
  Targeting domain
gucacgaaaaucagauuucaugu

SEQ ID NO: 2659 - RNA, 18 nt, Artificial Sequence
  Targeting domain
gaaaaucagauuucaugu

SEQ ID NO: 2660 - RNA, 24 nt, Artificial Sequence
  Targeting domain
gcuaauacaugagagugauuagug

SEQ ID NO: 2661 - RNA, 19 nt, Artificial Sequence
  Targeting domain
gcuugaacucugugccaaa

SEQ ID NO: 2662 - RNA, 22 nt, Artificial Sequence
  Targeting domain
gcucuagaugacaugagguaag

SEQ ID NO: 2663 - RNA, 24 nt, Artificial Sequence
  Targeting domain
gauguagauugagguagaaucaag

SEQ ID NO: 2664 - RNA, 21 nt, Artificial Sequence
  Targeting domain
guagauugagguagaaucaag

SEQ ID NO: 2665 - RNA, 18 nt, Artificial Sequence
  Targeting domain
gauugagguagaaucaag

SEQ ID NO: 2666 - RNA, 19 nt, Artificial Sequence
  Targeting domain
gaugcagaacuaguguaga

SEQ ID NO: 2667 - RNA, 21 nt, Artificial Sequence
  Targeting domain
gauguagauugagguagaauc

SEQ ID NO: 2668 - RNA, 18 nt, Artificial Sequence
  Targeting domain
guagauugagguagaauc

SEQ ID NO: 2669 - RNA, 23 nt, Artificial Sequence
  Targeting domain
gaaugaucauucuuguggcagua

SEQ ID NO: 2670 - RNA, 19 nt, Artificial Sequence
  Targeting domain
gaucauucuuguggcagua

SEQ ID NO: 2671 - RNA, 22 nt, Artificial Sequence
  Targeting domain
gaaugaucauucuuguggcagu

SEQ ID NO: 2672 - RNA, 18 nt, Artificial Sequence
  Targeting domain
gaucauucuuguggcagu

SEQ ID NO: 2673 - RNA, 22 nt, Artificial Sequence
  Targeting domain
gagagguaaagguucaugagac

SEQ ID NO: 2674 - RNA, 20 nt, Artificial Sequence
  Targeting domain
gagguaaagguucaugagac

SEQ ID NO: 2675 - RNA, 18 nt, Artificial Sequence
  Targeting domain
gguaaagguucaugagac

SEQ ID NO: 2676 - RNA, 23 nt, Artificial Sequence
  Targeting domain
gguagcuuuugacaguuuuuaag

SEQ ID NO: 2677 - RNA, 22 nt, Artificial Sequence
  Targeting domain
guagcuuuugacaguuuuuaag

SEQ ID NO: 2678 - RNA, 19 nt, Artificial Sequence
  Targeting domain
gcuuuugacaguuuuuaag

SEQ ID NO: 2679 - RNA, 24 nt, Artificial Sequence
  Targeting domain
guagcuuuugacaguuuuuaaggc

SEQ ID NO: 2680 - RNA, 21 nt, Artificial Sequence
  Targeting domain
gcuuuugacaguuuuuaaggc

SEQ ID NO: 2681 - RNA, 22 nt, Artificial Sequence
  Targeting domain
gaaauucacugagcaaaacaac

SEQ ID NO: 2682 - RNA, 23 nt, Artificial Sequence
  Targeting domain
guggcaguaaggaggauguaaga

SEQ ID NO: 2683 - RNA, 21 nt, Artificial Sequence
  Targeting domain
ggcaguaaggaggauguaaga

SEQ ID NO: 2684 - skipped

SEQ ID NO: 2685 - RNA, 20 nt, Artificial Sequence
  Targeting domain
ggaaauuauuguugcuuuuu

SEQ ID NO: 2686 - RNA, 19 nt, Artificial Sequence
  Targeting domain
gaaauuauuguugcuuuuu

SEQ ID NO: 2687 - RNA, 21 nt, Artificial Sequence
  Targeting domain
gaaaaacuugaaauuugauag

SEQ ID NO: 2688 - RNA, 24 nt, Artificial Sequence
  Targeting domain
gaagaaaaaagaaauagauguaga

SEQ ID NO: 2689 - RNA, 21 nt, Artificial Sequence
  Targeting domain
gaaaaaagaaauagauguaga

SEQ ID NO: 2690 - RNA, 22 nt, Artificial Sequence
  Targeting domain
guguugcccaggcuggagugca

SEQ ID NO: 2691 - RNA, 20 nt, Artificial Sequence
  Targeting domain
guugcccaggcuggagugca

SEQ ID NO: 2692 - RNA, 22 nt, Artificial Sequence
  Targeting domain
gagucucacuguguugcccagg

SEQ ID NO: 2693 - RNA, 20 nt, Artificial Sequence
  Targeting domain
gucucacuguguugcccagg

SEQ ID NO: 2694 - RNA, 21 nt, Artificial Sequence
  Targeting domain
uuuuuaaggcggggagucaca

SEQ ID NO: 2695 - skipped

SEQ ID NO: 2696 - RNA, 19 nt, Artificial Sequence
  Targeting domain
uuuaaggcggggagucaca

SEQ ID NO: 2697 - RNA, 18 nt, Artificial Sequence
  Targeting domain
uuaaggcggggagucaca

SEQ ID NO: 2698 - skipped

SEQ ID NO: 2699 - RNA, 18 nt, Artificial Sequence
  Targeting domain
ucaaaagcuaccgguuac

SEQ ID NO: 2700 - RNA, 22 nt, Artificial Sequence
  Targeting domain
uucaucucuugcucuagaugac

SEQ ID NO: 2701 - RNA, 21 nt, Artificial Sequence
  Targeting domain
ucaucucuugcucuagaugac

SEQ ID NO: 2702 - RNA, 18 nt, Artificial Sequence
  Targeting domain
ucucuugcucuagaugac

SEQ ID NO: 2703 - RNA, 22 nt, Artificial Sequence
  Targeting domain
ucacgaaaaucagauuucaugu

SEQ ID NO: 2704 - RNA, 22 nt, Artificial Sequence
  Targeting domain
uaauacaugagagugauuagug

SEQ ID NO: 2705 - RNA, 19 nt, Artificial Sequence
  Targeting domain
uacaugagagugauuagug

SEQ ID NO: 2706 - RNA, 24 nt, Artificial Sequence
  Targeting domain
uauuagcuugaacucugugccaaa

SEQ ID NO: 2707 - RNA, 22 nt, Artificial Sequence
  Targeting domain
uuagcuugaacucugugccaaa

SEQ ID NO: 2708 - RNA, 21 nt, Artificial Sequence
  Targeting domain
uagcuugaacucugugccaaa

SEQ ID NO: 2709 - RNA, 24 nt, Artificial Sequence
  Targeting domain
uugcucuagaugacaugagguaag

SEQ ID NO: 2710 - RNA, 23 nt, Artificial Sequence
  Targeting domain
ugcucuagaugacaugagguaag

SEQ ID NO: 2711 - skipped

SEQ ID NO: 2712 - RNA, 18 nt, Artificial Sequence
  Targeting domain
uagaugacaugagguaag

SEQ ID NO: 2713 - RNA, 22 nt, Artificial Sequence
  Targeting domain
uguagauugagguagaaucaag

SEQ ID NO: 2714 - RNA, 20 nt, Artificial Sequence
  Targeting domain
uagauugagguagaaucaag

SEQ ID NO: 2715 - RNA, 24 nt, Artificial Sequence
  Targeting domain
uauaagaugcagaacuaguguaga

SEQ ID NO: 2716 - RNA, 22 nt, Artificial Sequence
  Targeting domain
uaagaugcagaacuaguguaga

SEQ ID NO: 2717 - RNA, 23 nt, Artificial Sequence
  Targeting domain
uagauguagauugagguagaauc

SEQ ID NO: 2718 - RNA, 19 nt, Artificial Sequence
  Targeting domain
uguagauugagguagaauc

SEQ ID NO: 2719 - skipped

SEQ ID NO: 2720 - RNA, 24 nt, Artificial Sequence
  Targeting domain
uagaaugaucauucuuguggcagu

SEQ ID NO: 2721 - RNA, 19 nt, Artificial Sequence
  Targeting domain
ugaucauucuuguggcagu

SEQ ID NO: 2722 - RNA, 24 nt, Artificial Sequence
  Targeting domain
uugagagguaaagguucaugagac

SEQ ID NO: 2723 - RNA, 23 nt, Artificial Sequence
  Targeting domain
ugagagguaaagguucaugagac

SEQ ID NO: 2724 - RNA, 21 nt, Artificial Sequence
  CEP290-1915 targeting domain (RNA)
uagcuuuugacaguuuuuaag

SEQ ID NO: 2725 - RNA, 23 nt, Artificial Sequence
  Targeting domain
uagcuuuugacaguuuuuaaggc

SEQ ID NO: 2726 - RNA, 19 nt, Artificial Sequence
  Targeting domain
uuuugacaguuuuuaaggc

SEQ ID NO: 2727 - RNA, 18 nt, Artificial Sequence
  CEP290-1918 targeting domain (RNA)
uuugacaguuuuuaaggc

SEQ ID NO: 2728 - RNA, 24 nt, Artificial Sequence
  Targeting domain
uagaaauucacugagcaaaacaac

SEQ ID NO: 2729 - RNA, 18 nt, Artificial Sequence
  Targeting domain
uucacugagcaaaacaac

SEQ ID NO: 2730 - RNA, 24 nt, Artificial Sequence
  Targeting domain
uguggcaguaaggaggauguaaga

SEQ ID NO: 2731 - RNA, 22 nt, Artificial Sequence
  Targeting domain
uggcaguaaggaggauguaaga

SEQ ID NO: 2732 - RNA, 24 nt, Artificial Sequence
  Targeting domain
uaucaaaagacuuauauuccauua

SEQ ID NO: 2733 - RNA, 22 nt, Artificial Sequence
  Targeting domain
ucaaaagacuuauauuccauua

SEQ ID NO: 2734 - RNA, 23 nt, Artificial Sequence
  Targeting domain
uuaggaaauuauuguugcuuuuu

SEQ ID NO: 2735 - RNA, 22 nt, Artificial Sequence
  Targeting domain
uaggaaauuauuguugcuuuuu

SEQ ID NO: 2736 - RNA, 23 nt, Artificial Sequence
  CEP290-1927 targeting domain
uguguugcccaggcuggagugca

SEQ ID NO: 2737 - RNA, 21 nt, Artificial Sequence
  Targeting domain
uguugcccaggcuggagugca

SEQ ID NO: 2738 - RNA, 19 nt, Artificial Sequence
  Targeting domain
uugcccaggcuggagugca

SEQ ID NO: 2739 - RNA, 18 nt, Artificial Sequence
  CEP290-1930 targeting domain
ugcccaggcuggagugca

SEQ ID NO: 2740 - RNA, 19 nt, Artificial Sequence
  CEP290-1931 targeting domain
ucucacuguguugcccagg

SEQ ID NO: 2741-2747 - skipped (7 entries)

SEQ ID NO: 2748 - RNA, 20 nt, Artificial Sequence
  CEP290-1940 targeting domain (RNA)
acuuaaugagugcuucccuc

SEQ ID NO: 2749-2751 - skipped (3 entries)

SEQ ID NO: 2752 - RNA, 17 nt, Artificial Sequence
  CEP290-1944 targeting domain (RNA)
agggucugguccauauu

SEQ ID NO: 2753 - RNA, 20 nt, Artificial Sequence
  CEP290-1945 targeting domain (RNA)
auaguggcugaaugacuucu

SEQ ID NO: 2754 - RNA, 17 nt, Artificial Sequence
  CEP290-1946 targeting domain (RNA)
augucugguuaaaagag

SEQ ID NO: 2755 - RNA, 20 nt, Artificial Sequence
  CEP290-1947 targeting domain (RNA)
caaagggucugguccauauu

SEQ ID NO: 2756-2760 - skipped (5 entries)

SEQ ID NO: 2761 - RNA, 17 nt, Artificial Sequence
  CEP290-1953 targeting domain (RNA)
uaaugagugcuucccuc

SEQ ID NO: 2762 - RNA, 20 nt, Artificial Sequence
  CEP290-1954 targeting domain (RNA)
uagaugucugguuaaaagag

SEQ ID NO: 2763 - RNA, 20 nt, Artificial Sequence
  CEP290-1955 targeting domain (RNA)
ucauucuccuuaggucacuu

SEQ ID NO: 2764 - skipped

SEQ ID NO: 2765 - RNA, 17 nt, Artificial Sequence
  CEP290-1957 targeting domain (RNA)
uucuccuuaggucacuu

SEQ ID NO: 2766 - RNA, 17 nt, Artificial Sequence
  CEP290-1958 targeting domain (RNA)
aagaaaaaagaaauaga

SEQ ID NO: 2767 - RNA, 20 nt, Artificial Sequence
  CEP290-1959 targeting domain (RNA)
agauugagguagaaucaaga

SEQ ID NO: 2768 - skipped

SEQ ID NO: 2769 - RNA, 17 nt, Artificial Sequence
  CEP290-1961 targeting domain (RNA)
caaaaaaagaauccucu

SEQ ID NO: 2770 - RNA, 20 nt, Artificial Sequence
  CEP290-1962 targeting domain (RNA)
caacaaaaaaagaauccucu

SEQ ID NO: 2771 - skipped

SEQ ID NO: 2772 - RNA, 17 nt, Artificial Sequence
  CEP290-1964 targeting domain (RNA)
cauucuucacacaugaa

SEQ ID NO: 2773 - RNA, 20 nt, Artificial Sequence
  CEP290-1965 targeting domain (RNA)
uagaagaaaaaagaaauaga

SEQ ID NO: 2774 - RNA, 20 nt, Artificial Sequence
  CEP290-1966 targeting domain (RNA)
ugagacuagaggucacgaaa

SEQ ID NO: 2775 - skipped

SEQ ID NO: 2776 - RNA, 20 nt, Artificial Sequence
  CEP290-1968 targeting domain (RNA)
uuccauucuucacacaugaa

SEQ ID NO: 2777 - RNA, 17 nt, Artificial Sequence
  CEP290-1969 targeting domain (RNA)
uugagguagaaucaaga

SEQ ID NO: 2778 - skipped

SEQ ID NO: 2779 - RNA, 102 nt, Artificial Sequence
  S. aureus gRNA
  misc_feature (1)..(20): Targeting domain, each n is a, c, u, g, unknown, or other
nnnnnnnnnnnnnnnnnnnnguuuuaguacucuggaaacagaaucuacuaaaacaaggcaaaaugccguguuuaucucgucaacuuguuggcgagauuuuuu

SEQ ID NO: 2780 - RNA, 17 nt, Artificial Sequence
  CEP290-B41/-B1291 targeting domain (RNA)
ucauucuuguggcagua

SEQ ID NO: 2781 - DNA, 22 bp, Artificial Sequence
  CEP290-230 targeting domain (DNA)
ggcacagagttcaagctaatac

SEQ ID NO: 2782 - DNA, 22 bp, Artificial Sequence
  CEP290-312/-926 targeting domain (DNA)
gactcataatttagtaggaatc

SEQ ID NO: 2783 - DNA, 20 bp, Artificial Sequence
  CEP290-B1036/-482 targeting domain (DNA)
gaaatagaggcttatggatt

SEQ ID NO: 2784 - DNA, 19 bp, Artificial Sequence
  CEP290-485 targeting domain (DNA)
ggataggacagaggacatg

SEQ ID NO: 2785 - DNA, 102 bp, Artificial Sequence
  S. aureus gRNA
  misc_feature (1)..(20): Targeting domain, each n is a, c, t, g, unknown, or other
nnnnnnnnnnnnnnnnnnnngttttagtactctggaaacagaatctactaaaacaaggcaaaatgccgtgtttatctcgtcaacttgttggcgagatttttt

SEQ ID NO: 2786 - RNA, 102 nt, Artificial Sequence
  S. aureus gRNA
  misc_feature (1)..(20): Targeting domain, each n is a, c, u, g, unknown, or other
nnnnnnnnnnnnnnnnnnnnguuauaguacucuggaaacagaaucuacuauaacaaggcaaaaugccguguuuaucucgucaacuuguuggcgagauuuuuu

SEQ ID NO: 2787 - DNA, 102 bp, Artificial Sequence
  S. aureus gRNA
  misc_feature (1)..(20): Targeting domain, each n is a, c, t, g, unknown, or other
nnnnnnnnnnnnnnnnnnnngttatagtactctggaaacagaatctactataacaaggcaaaatgccgtgtttatctcgtcaacttgttggcgagatttttt

SEQ ID NO: 2788 - DNA, 36 bp, Mus musculus
ccctcaaacacatgtctcacgcagcttagacattct

SEQ ID NO: 2789 - DNA, 35 bp, Mus musculus
cagaactcggtcagcatgctacagatagcttatct

SEQ ID NO: 2790 - DNA, 36 bp, Mus musculus
cagaactcggtcaggcatgctacagatagcttatct

SEQ ID NO: 2791 - DNA, 31 bp, Mus musculus
cagaactcggcatgctacagatagcttatct

SEQ ID NO: 2792 - DNA, 9 bp, Mus musculus
ccctcaaag

SEQ ID NO: 2793 - DNA, 21 bp, Mus musculus
catgctacagatagcttatct

SEQ ID NO: 2794 - DNA, 21 bp, Artificial Sequence
  C1 targeting domain (DNA)
ggccggctaatttagtagaga

SEQ ID NO: 2795 - RNA, 21 nt, Artificial Sequence
  C1 targeting domain (RNA)
ggccggcuaauuuaguagaga

SEQ ID NO: 2796 - DNA, 20 bp, Artificial Sequence
  C2 targeting domain (DNA)
gttatgaagaataatacaaa

SEQ ID NO: 2797 - RNA, 20 nt, Artificial Sequence
  C2 targeting domain (RNA)
guuaugaagaauaauacaaa

SEQ ID NO: 2798 - DNA, 5120 bp, Artificial Sequence
  pAD26/SplitGFP+WildType/CEP290/Kan
acataacttacggtaaatggcccgcctggctgaccgcccaacgacccccgcccattgacgtcaataatgacgtatgttcccatagtaacgccaatagggactttccattgacgtcaatgggtggactatttacggtaaactgcccacttggcagtacatcaagtgtatcatatgccaagtacgccccctattgacgtcaatgacggtaaatggcccgcctggcattatgcccagtacatgaccttatgggactttcctacttggcagtacatctacgtattagtcatcgctattaccatggtgatgcggttttggcagtacatcaatgggcgtggatagcggtttgactcacggggatttccaagtctccaccccattgacgtcaatgggagtttgttttggcaccaaaatcaacgggactttccaaaatgtcgtaacaactccgccccattgacgcaaatgggcggtaggcgtgtacggtgggaggtctatataagcagagctggtttagtgaaccgtcagatccgctagagatccgcggccgctaatacgactcactatagggagagccgccaccatggtgagcaagggcgaggagctgttcaccggggtggtgcccatcctggtcgagctggacggcgacgtaaacggccacaagttcagcgtgtccggcgagggcgagggcgatgccacctacggcaagctgaccctgaagttcatctgcaccaccggcaagctgcccgtgccctggcccaccctcgtgaccaccctgacctacggaggtaagtttgtgtgattcttgaaccttgtgaaattagccatttttcttcaatatttttgtgtttggggggatttggcagattttaattaaagtttgcctgcatttatataaatttaacagagatataattatccatattattcattgtggctgaatgacttctgaatgattatctagatcattctccttaggtcacttgcatgatttagctgaatcaaacctcttttaaccagacatctaagagaaaaaggagcatgaaacaggtagaatattgtaatcaaaggagggaagcactcattaagtgcccatccctttctcttacccctgtacccagaacaaactattctcccatggtccctggcttttgttccttggaatggatgtagccaacagtagctgaaatattaagggctcttcctggaccatggatgcactctgtaaattctcatcattttttattgtagaataaatgtagaattttaatgtagaataaatttatttaatgtagaataaaaaataaaaaaactagagtagaatatcataagttacaatctgtgaatatggaccagaccctttgtagttatcttacagccacttgaactctataccttttactgaggacagaacaagctcctgatttgttcatcttcctcatcagaaatagaggcttatggattttggattattcttatctaagatcctttcacaggagtagaataagatctaattctattagctcaaaagcttttgctggctcatagagacacattcagtaaatgaaaacgttgttctgagtagctttcaggattcctactaaattatgagtcatgtttatcaatattatttagaagtaatcataatcagtttgctttctgctgcttttgccaaagagaggtgattatgttactttttatagaaaattatgcctatttagtgtggtgataatttatttttttccattctccatgtcctctgtcctatcctctccagcattagaaagtcctaggcaagagacatcttgtggataatgtatcaatgagtgatgtttaacgttatcattttcccaaagagtatttttcatctttcctaaagattttttttttttttttttgagatggagtttcattctgtcacccaggctgagtgcagtggcacgatctcggcttaacgcttactgcatcctctgcctcccagattcaagcagttctcctgcctcagcctctgagtagctgggattacaggtgtgcaccaccacaccagctaatttttttttttttttttttttttttgaggcagagtctcgctctgtcacccaggctggagtgcagtggcgccatcttggctcactgcaagctccacctcccgggttcaggccgttctcctgcctcagcctcctgagtagctggtaccacaggcacccaccatcatgcccggctaattttttgtatttttagtagagatggggtttcaccttgttagccaggatggtgtcgatctcctgaactcgtgatccacccgcctcggcctcctaaagtgctgggattacagatgtgagccaccgcacctggccccagttgtaattgtgaatatctcatacctatccctattggcagtgtcttagttttattttttattatctttattgtggcagccattattcctgtctctatctccagtcttacatcctccttactgccacaagaatgatcattctaaacatgaatcctaccctgtgactcccatgtgactccccgccttaaaaactgtcaaaagctaccggttacctgaagggtaaaagtcaagtcccctacttacctcatgtcatctagagcaagagatgaactagctgagttttctgaccacagtgttctttcttatgtatgttcttttgtacgtgctcttttctatatatagggaaccatttctctcttccagttgttttgctcagtgaatttctattcctgtttcaaaacttgttcaggcattaccttttttttcttaagcatactttttttaatggaacaaagtcactcctgtctacactagttctgcatcttatacataggttttgtacatagtacatatttatatcacatcaaattatatgtgtttacatatctgtcttccttaatggaatataagtcttttgatataaggaactatttaatttgtttctgtgtgttgagtatctcctgtttggcacagagttcaagctaatacatgagagtgattagtggtggagagccacagtgcatgtggtgtcaaatatggtgcttaggaaattattgttgctttttgagaggtaaaggttcatgagactagaggtcacgaaaatcagatttcatgtgtgaagaatggaatagatgtattatatatggaggaaattctaattttgtaaaaaactggattgtgagttttaaggagatgttatataaagttaagacaatgtcattttgtggtattggtctgaattacaatgtagtttcttagtgatatttttcctttattcagtgcagtgcttcagccgctaccccgaccacatgaagcagcacgacttcttcaagtccgccatgcccgaaggctacgtccaggagcgcaccatcttcttcaaggacgacggcaactacaagacccgcgccgaggtgaagttcgagggcgacaccctggtgaaccgcatcgagctgaagggcatcgacttcaaggaggacggcaacatcctggggcacaagctggagtacaactacaacagccacaacgtctatatcatggccgacaagcagaagaacggcatcaaggtgaacttcaagatccgccacaacatcgaggacggcagcgtgcagctcgccgaccactaccagcagaacacccccatcggcgacggccccgtgctgctgcccgacaaccactacctgagcacccagtccgccctgagcaaagaccccaacgagaagcgcgatcacatggtcctgctggagttcgtgaccgccgccgggatcactctcggcatggacgagctgtacaagtcgagctagcaataaaggatcgtttattttcattggaagcgtgtgttggttttttgatcaggcgcgtccaagcttgcatgctggggagagatctgcggccgctcgagtggctccggtgcccgtcagtgggcagagcgcacatcgcccacagtccccgagaagttggggggaggggtcggcaattgaaccggtgcctagagaaggtggcgcggggtaaactgggaaagtgatgtcgtgtactggctccgcctttttcccgagggtgggggagaaccgtatataagtgcagtagtcgccgtgaacgttctttttcgcaacgggtttgccgccagaacacaggtgtcgtgaccgcgggcggccgccgctagcgctaccggtcgccaccatggtgagcaagggcgaggaggataacatggccatcatcaaggagttcatgcgcttcaaggtgcacatggagggctccgtgaacggccacgagttcgagatcgagggcgagggcgagggccgcccctacgagggcacccagaccgccaagctgaaggtgaccaagggtggccccctgcccttcgcctgggacatcctgtcccctcagttcatgtacggctccaaggcctacgtgaagcaccccgccgacatccccgactacttgaagctgtccttccccgagggcttcaagtgggagcgcgtgatgaacttcgaggacggcggcgtggtgaccgtgacccaggactcctccctgcaggacggcgagttcatctacaaggtgaagctgcgcggcaccaacttcccctccgacggccccgtaatgcagaagaagaccatgggctgggaggcctcctccgagcggatgtaccccgaggacggcgccctgaagggcgagatcaagcagaggctgaagctgaaggacggcggccactacgacgctgaggtcaagaccacctacaaggccaagaagcccgtgcagctgcccggcgcctacaacgtcaacatcaagttggacatcacctcccacaacgaggactacaccatcgtggaacagtacgaacgcgccgagggccgccactccaccggcggcatggacgagctgtacaagtgaccggtcatcatcaccatcaccattgagtttaaacccgctgatcagcctcgactgtgccttctagttgccagccatctgttgtttgcccctcccccgtgccttccttgaccctggaaggtgccactcccactgtcctttcctaataaaatgaggaaattgcatcgcattgtctgagtaggtgtcattctattctggggggtggggtggggcaggacagcaa

SEQ ID NO: 2799 - DNA, 5120 bp, Artificial Sequence
  pAD27/SplitGFP+Mutant/CEP290/Kan
acataacttacggtaaatggcccgcctggctgaccgcccaacgacccccgcccattgacgtcaataatgacgtatgttcccatagtaacgccaatagggactttccattgacgtcaatgggtggactatttacggtaaactgcccacttggcagtacatcaagtgtatcatatgccaagtacgccccctattgacgtcaatgacggtaaatggcccgcctggcattatgcccagtacatgaccttatgggactttcctacttggcagtacatctacgtattagtcatcgctattaccatggtgatgcggttttggcagtacatcaatgggcgtggatagcggtttgactcacggggatttccaagtctccaccccattgacgtcaatgggagtttgttttggcaccaaaatcaacgggactttccaaaatgtcgtaacaactccgccccattgacgcaaatgggcggtaggcgtgtacggtgggaggtctatataagcagagctggtttagtgaaccgtcagatccgctagagatccgcggccgctaatacgactcactatagggagagccgccaccatggtgagcaagggcgaggagctgttcaccggggtggtgcccatcctggtcgagctggacggcgacgtaaacggccacaagttcagcgtgtccggcgagggcgagggcgatgccacctacggcaagctgaccctgaagttcatctgcaccaccggcaagctgcccgtgccctggcccaccctcgtgaccaccctgacctacggaggtaagtttgtgtgattcttgaaccttgtgaaattagccatttttcttcaatatttttgtgtttggggggatttggcagattttaattaaagtttgcctgcatttatataaatttaacagagatataattatccatattattcattgtggctgaatgacttctgaatgattatctagatcattctccttaggtcacttgcatgatttagctgaatcaaacctcttttaaccagacatctaagagaaaaaggagcatgaaacaggtagaatattgtaatcaaaggagggaagcactcattaagtgcccatccctttctcttacccctgtacccagaacaaactattctcccatggtccctggcttttgttccttggaatggatgtagccaacagtagctgaaatattaagggctcttcctggaccatggatgcactctgtaaattctcatcattttttattgtagaataaatgtagaattttaatgtagaataaatttatttaatgtagaataaaaaataaaaaaactagagtagaatatcataagttacaatctgtgaatatggaccagaccctttgtagttatcttacagccacttgaactctataccttttactgaggacagaacaagctcctgatttgttcatcttcctcatcagaaatagaggcttatggattttggattattcttatctaagatcctttcacaggagtagaataagatctaattctattagctcaaaagcttttgctggctcatagagacacattcagtaaatgaaaacgttgttctgagtagctttcaggattcctactaaattatgagtcatgtttatcaatattatttagaagtaatcataatcagtttgctttctgctgcttttgccaaagagaggtgattatgttactttttatagaaaattatgcctatttagtgtggtgataatttatttttttccattctccatgtcctctgtcctatcctctccagcattagaaagtcctaggcaagagacatcttgtggataatgtatcaatgagtgatgtttaacgttatcattttcccaaagagtatttttcatctttcctaaagattttttttttttttttttgagatggagtttcattctgtcacccaggctgagtgcagtggcacgatctcggcttaacgcttactgcatcctctgcctcccagattcaagcagttctcctgcctcagcctctgagtagctgggattacaggtgtgcaccaccacaccagctaatttttttttttttttttttttttttgaggcagagtctcgctctgtcacccaggctggagtgcagtggcgccatcttggctcactgcaagctccacctcccgggttcaggccgttctcctgcctcagcctcctgagtagctggtaccacaggcacccaccatcatgcccggctaattttttgtatttttagtagagatggggtttcaccttgttagccaggatggtgtcgatctcctgaactcgtgatccacccgcctcggcctcctaaagtgctgggattacagatgtgagccaccgcacctggccccagttgtaattgtgagtatctcatacctatccctattggcagtgtcttagttttattttttattatctttattgtggcagccattattcctgtctctatctccagtcttacatcctccttactgccacaagaatgatcattctaaacatgaatcctaccctgtgactcccatgtgactccccgccttaaaaactgtcaaaagctaccggttacctgaagggtaaaagtcaagtcccctacttacctcatgtcatctaaagcaagagatgaactagctgagttttctgaccacagtgttctttcttatgtatgttcttttgtacgtgctcttttctatatatagggaaccatttctctcttccagttgttttgctcagtgaatttctattcctgtttcaaaacttgttcaggcattaccttttttttcttaagcatactttttttaatggaacaaagtcactcctgtctacactagttctgcatcttatacataggttttgtacatagtacatatttatatcacatcaaattatatgtgtttacatatctgtcttccttaatggaatataagtcttttgatataaggaactatttaatttgtttctgtgtgttgagtatctcctgtttggcacagagttcaagctaatacatgagagtgattagtggtggagagccacagtgcatgtggtgtcaaatatggtgcttaggaaattattgttgctttttgagaggtaaaggttcatgagactagaggtcacgaaaatcagatttcatgtgtgaagaatggaatagatgtattatatatggaggaaattctaattttgtaaaaaactggattgtgagttttaaggagatgttatataaagttaagacaatgtcattttgtggtattggtctgaattacaatgtagtttcttagtgatatttttcctttattcagtgcagtgcttcagccgctaccccgaccacatgaagcagcacgacttcttcaagtccgccatgcccgaaggctacgtccaggagcgcaccatcttcttcaaggacgacggcaactacaagacccgcgccgaggtgaagttcgagggcgacaccctggtgaaccgcatcgagctgaagggcatcgacttcaaggaggacggcaacatcctggggcacaagctggagtacaactacaacagccacaacgtctatatcatggccgacaagcagaagaacggcatcaaggtgaacttcaagatccgccacaacatcgaggacggcagcgtgcagctcgccgaccactaccagcagaacacccccatcggcgacggccccgtgctgctgcccgacaaccactacctgagcacccagtccgccctgagcaaagaccccaacgagaagcgcgatcacatggtcctgctggagttcgtgaccgccgccgggatcactctcggcatggacgagctgtacaagtcgagctagcaataaaggatcgtttattttcattggaagcgtgtgttggttttttgatcaggcgcgtccaagcttgcatgctggggagagatctgcggccgctcgagtggctccggtgcccgtcagtgggcagagcgcacatcgcccacagtccccgagaagttggggggaggggtcggcaattgaaccggtgcctagagaaggtggcgcggggtaaactgggaaagtgatgtcgtgtactggctccgcctttttcccgagggtgggggagaaccgtatataagtgcagtagtcgccgtgaacgttctttttcgcaacgggtttgccgccagaacacaggtgtcgtgaccgcgggcggccgccgctagcgctaccggtcgccaccatggtgagcaagggcgaggaggataacatggccatcatcaaggagttcatgcgcttcaaggtgcacatggagggctccgtgaacggccacgagttcgagatcgagggcgagggcgagggccgcccctacgagggcacccagaccgccaagctgaaggtgaccaagggtggccccctgcccttcgcctgggacatcctgtcccctcagttcatgtacggctccaaggcctacgtgaagcaccccgccgacatccccgactacttgaagctgtccttccccgagggcttcaagtgggagcgcgtgatgaacttcgaggacggcggcgtggtgaccgtgacccaggactcctccctgcaggacggcgagttcatctacaaggtgaagctgcgcggcaccaacttcccctccgacggccccgtaatgcagaagaagaccatgggctgggaggcctcctccgagcggatgtaccccgaggacggcgccctgaagggcgagatcaagcagaggctgaagctgaaggacggcggccactacgacgctgaggtcaagaccacctacaaggccaagaagcccgtgcagctgcccggcgcctacaacgtcaacatcaagttggacatcacctcccacaacgaggactacaccatcgtggaacagtacgaacgcgccgagggccgccactccaccggcggcatggacgagctgtacaagtgaccggtcatcatcaccatcaccattgagtttaaacccgctgatcagcctcgactgtgccttctagttgccagccatctgttgtttgcccctcccccgtgccttccttgaccctggaaggtgccactcccactgtcctttcctaataaaatgaggaaattgcatcgcattgtctgagtaggtgtcattctattctggggggtggggtggggcaggacagcaa

SEQ ID NO: 2800 - DNA, 5120 bp, Artificial Sequence
  pAD28/SplitGFP+Mutant/CEP290/Inverted/Kan
acataacttacggtaaatggcccgcctggctgaccgcccaacgacccccgcccattgacgtcaataatgacgtatgttcccatagtaacgccaatagggactttccattgacgtcaatgggtggactatttacggtaaactgcccacttggcagtacatcaagtgtatcatatgccaagtacgccccctattgacgtcaatgacggtaaatggcccgcctggcattatgcccagtacatgaccttatgggactttcctacttggcagtacatctacgtattagtcatcgctattaccatggtgatgcggttttggcagtacatcaatgggcgtggatagcggtttgactcacggggatttccaagtctccaccccattgacgtcaatgggagtttgttttggcaccaaaatcaacgggactttccaaaatgtcgtaacaactccgccccattgacgcaaatgggcggtaggcgtgtacggtgggaggtctatataagcagagctggtttagtgaaccgtcagatccgctagagatccgcggccgctaatacgactcactatagggagagccgccaccatggtgagcaagggcgaggagctgttcaccggggtggtgcccatcctggtcgagctggacggcgacgtaaacggccacaagttcagcgtgtccggcgagggcgagggcgatgccacctacggcaagctgaccctgaagttcatctgcaccaccggcaagctgcccgtgccctggcccaccctcgtgaccaccctgacctacggaggtaagtttgtgtgattcttgaaccttgtgaaattagccatttttcttcaatatttttgtgtttggggggatttggcagattttaattaaagtttgcctgcatttatataaatttaacagagatataattatccatattattcattgtggctgaatgacttctgaatgattatctagatcattctccttaggtcacttgcatgatttagctgaatcaaacctcttttaaccagacatctaagagaaaaaggagcatgaaacaggtagaatattgtaatcaaaggagggaagcactcattaagtgcccatccctttctcttacccctgtacccagaacaaactattctcccatggtccctggcttttgttccttggaatggatgtagccaacagtagctgaaatattaagggctcttcctggaccatggatgcactctgtaaattctcatcattttttattgtagaataaatgtagaattttaatgtagaataaatttatttaatgtagaataaaaaataaaaaaactagagtagaatatcataagttacaatctgtgaatatggaccagaccctttgtagttatcttacagccacttgaactctatacgtaaccggtagcttttgacagtttttaaggcggggagtcacatgggagtcacagggtaggattcatgtttagaatgatcattcttgtggcagtaaggaggatgtaagactggagatagagacaggaataatggctgccacaataaagataataaaaaataaaactaagacactgccaatagggataggtatgagatactcacaattacaactggggccaggtgcggtggctcacatctgtaatcccagcactttaggaggccgaggcgggtggatcacgagttcaggagatcgacaccatcctggctaacaaggtgaaaccccatctctactaaaaatacaaaaaattagccgggcatgatggtgggtgcctgtggtaccagctactcaggaggctgaggcaggagaacggcctgaacccgggaggtggagcttgcagtgagccaagatggcgccactgcactccagcctgggtgacagagcgagactctgcctcaaaaaaaaaaaaaaaaaaaaaaaaattagctggtgtggtggtgcacacctgtaatcccagctactcagaggctgaggcaggagaactgcttgaatctgggaggcagaggatgcagtaagcgttaagccgagatcgtgccactgcactcagcctgggtgacagaatgaaactccatctcaaaaaaaaaaaaaaaaaatctttaggaaagatgaaaaatactctttgggaaaatgataacgttaaacatcactcattgatacattatccacaagatgtctcttgcctaggactttctaatgctggagaggataggacagaggacatggagaatggaaaaaaataaattatcaccacactaaataggcataattttctataaaaagtaacataatcacctctctttggcaaaagcagcagaaagcaaactgattatgattacttctaaataatattgataaacatgactcataatttagtaggaatcctgaaagctactcagaacaacgttttcatttactgaatgtgtctctatgagccagcaaaagcttttgagctaatagaattagatcttattctactcctgtgaaaggatcttagataagaataatccaaaatccataagcctctatttctgatgaggaagatgaacaaatcaggagcttgttctgtcctcagtaaaagctgaagggtaaaagtcaagtcccctacttacctcatgtcatctaaagcaagagatgaactagctgagttttctgaccacagtgttctttcttatgtatgttcttttgtacgtgctcttttctatatatagggaaccatttctctcttccagttgttttgctcagtgaatttctattcctgtttcaaaacttgttcaggcattaccttttttttcttaagcatactttttttaatggaacaaagtcactcctgtctacactagttctgcatcttatacataggttttgtacatagtacatatttatatcacatcaaattatatgtgtttacatatctgtcttccttaatggaatataagtcttttgatataaggaactatttaatttgtttctgtgtgttgagtatctcctgtttggcacagagttcaagctaatacatgagagtgattagtggtggagagccacagtgcatgtggtgtcaaatatggtgcttaggaaattattgttgctttttgagaggtaaaggttcatgagactagaggtcacgaaaatcagatttcatgtgtgaagaatggaatagatgtattatatatggaggaaattctaattttgtaaaaaactggattgtgagttttaaggagatgttatataaagttaagacaatgtcattttgtggtattggtctgaattacaatgtagtttcttagtgatatttttcctttattcagtgcagtgcttcagccgctaccccgaccacatgaagcagcacgacttcttcaagtccgccatgcccgaaggctacgtccaggagcgcaccatcttcttcaaggacgacggcaactacaagacccgcgccgaggtgaagttcgagggcgacaccctggtgaaccgcatcgagctgaagggcatcgacttcaaggaggacggcaacatcctggggcacaagctggagtacaactacaacagccacaacgtctatatcatggccgacaagcagaagaacggcatcaaggtgaacttcaagatccgccacaacatcgaggacggcagcgtgcagctcgccgaccactaccagcagaacacccccatcggcgacggccccgtgctgctgcccgacaaccactacctgagcacccagtccgccctgagcaaagaccccaacgagaagcgcgatcacatggtcctgctggagttcgtgaccgccgccgggatcactctcggcatggacgagctgtacaagtcgagctagcaataaaggatcgtttattttcattggaagcgtgtgttggttttttgatcaggcgcgtccaagcttgcatgctggggagagatctgcggccgctcgagtggctccggtgcccgtcagtgggcagagcgcacatcgcccacagtccccgagaagttggggggaggggtcggcaattgaaccggtgcctagagaaggtggcgcggggtaaactgggaaagtgatgtcgtgtactggctccgcctttttcccgagggtgggggagaaccgtatataagtgcagtagtcgccgtgaacgttctttttcgcaacgggtttgccgccagaacacaggtgtcgtgaccgcgggcggccgccgctagcgctaccggtcgccaccatggtgagcaagggcgaggaggataacatggccatcatcaaggagttcatgcgcttcaaggtgcacatggagggctccgtgaacggccacgagttcgagatcgagggcgagggcgagggccgcccctacgagggcacccagaccgccaagctgaaggtgaccaagggtggccccctgcccttcgcctgggacatcctgtcccctcagttcatgtacggctccaaggcctacgtgaagcaccccgccgacatccccgactacttgaagctgtccttccccgagggcttcaagtgggagcgcgtgatgaacttcgaggacggcggcgtggtgaccgtgacccaggactcctccctgcaggacggcgagttcatctacaaggtgaagctgcgcggcaccaacttcccctccgacggccccgtaatgcagaagaagaccatgggctgggaggcctcctccgagcggatgtaccccgaggacggcgccctgaagggcgagatcaagcagaggctgaagctgaaggacggcggccactacgacgctgaggtcaagaccacctacaaggccaagaagcccgtgcagctgcccggcgcctacaacgtcaacatcaagttggacatcacctcccacaacgaggactacaccatcgtggaacagtacgaacgcgccgagggccgccactccaccggcggcatggacgagctgtacaagtgaccggtcatcatcaccatcaccattgagtttaaacccgctgatcagcctcgactgtgccttctagttgccagccatctgttgtttgcccctcccccgtgccttccttgaccctggaaggtgccactcccactgtcctttcctaataaaatgaggaaattgcatcgcattgtctgagtaggtgtcattctattctggggggtggggtggggcaggacagcaa

SEQ ID NO: 2801 - DNA, 3944 bp, Artificial Sequence
  pAD29/SplitGFP+Deletion/CEP290/Kan
acataacttacggtaaatggcccgcctggctgaccgcccaacgacccccgcccattgacgtcaataatgacgtatgttcccatagtaacgccaatagggactttccattgacgtcaatgggtggactatttacggtaaactgcccacttggcagtacatcaagtgtatcatatgccaagtacgccccctattgacgtcaatgacggtaaatggcccgcctggcattatgcccagtacatgaccttatgggactttcctacttggcagtacatctacgtattagtcatcgctattaccatggtgatgcggttttggcagtacatcaatgggcgtggatagcggtttgactcacggggatttccaagtctccaccccattgacgtcaatgggagtttgttttggcaccaaaatcaacgggactttccaaaatgtcgtaacaactccgccccattgacgcaaatgggcggtaggcgtgtacggtgggaggtctatataagcagagctggtttagtgaaccgtcagatccgctagagatccgcggccgctaatacgactcactatagggagagccgccaccatggtgagcaagggcgaggagctgttcaccggggtggtgcccatcctggtcgagctggacggcgacgtaaacggccacaagttcagcgtgtccggcgagggcgagggcgatgccacctacggcaagctgaccctgaagttcatctgcaccaccggcaagctgcccgtgccctggcccaccctcgtgaccaccctgacctacggaggtaagtttgtgtgattcttgaaccttgtgaaattagccatttttcttcaatatttttgtgtttggggggatttggcagattttaattaaagtttgcctgcatttatataaatttaacagagatataattatccatattattcattgtggctgaatgacttctgaatgattatctagatcattctccttaggtcacttgcatgatttagctgaatcaaacctcttttaaccagacatctaagagaaaaaggagcatgaaacaggtagaatattgtaatcaaaggagggaagcactcattaagtgcccatccctttctcttacccctgtacccagaacaaactattctcccatggtccctggcttttgttccttggaatggatgtagccaacagtagctgaaatattaagggctcttcctggaccatggatgcactctgtaaattctcatcattttttattgtagaataaatgtagaattttaatgtagaataaatttatttaatgtagaataaaaaataaaaaaactagagtagaatatcataagttacaatctgtgaatatggaccagaccctttgtagttatcttacagccacttgaactctatacctgaagggtaaaagtcaagtcccctacttacctcatgtcatctaaagcaagagatgaactagctgagttttctgaccacagtgttctttcttatgtatgttcttttgtacgtgctcttttctatatatagggaaccatttctctcttccagttgttttgctcagtgaatttctattcctgtttcaaaacttgttcaggcattaccttttttttcttaagcatactttttttaatggaacaaagtcactcctgtctacactagttctgcatcttatacataggttttgtacatagtacatatttatatcacatcaaattatatgtgtttacatatctgtcttccttaatggaatataagtcttttgatataaggaactatttaatttgtttctgtgtgttgagtatctcctgtttggcacagagttcaagctaatacatgagagtgattagtggtggagagccacagtgcatgtggtgtcaaatatggtgcttaggaaattattgttgctttttgagaggtaaaggttcatgagactagaggtcacgaaaatcagatttcatgtgtgaagaatggaatagatgtattatatatggaggaaattctaattttgtaaaaaactggattgtgagttttaaggagatgttatataaagttaagacaatgtcattttgtggtattggtctgaattacaatgtagtttcttagtgatatttttcctttattcagtgcagtgcttcagccgctaccccgaccacatgaagcagcacgacttcttcaagtccgccatgcccgaaggctacgtccaggagcgcaccatcttcttcaaggacgacggcaactacaagacccgcgccgaggtgaagttcgagggcgacaccctggtgaaccgcatcgagctgaagggcatcgacttcaaggaggacggcaacatcctggggcacaagctggagtacaactacaacagccacaacgtctatatcatggccgacaagcagaagaacggcatcaaggtgaacttcaagatccgccacaacatcgaggacggcagcgtgcagctcgccgaccactaccagcagaacacccccatcggcgacggccccgtgctgctgcccgacaaccactacctgagcacccagtccgccctgagcaaagaccccaacgagaagcgcgatcacatggtcctgctggagttcgtgaccgccgccgggatcactctcggcatggacgagctgtacaagtcgagctagcaataaaggatcgtttattttcattggaagcgtgtgttggttttttgatcaggcgcgtccaagcttgcatgctggggagagatctgcggccgctcgagtggctccggtgcccgtcagtgggcagagcgcacatcgcccacagtccccgagaagttggggggaggggtcggcaattgaaccggtgcctagagaaggtggcgcggggtaaactgggaaagtgatgtcgtgtactggctccgcctttttcccgagggtgggggagaaccgtatataagtgcagtagtcgccgtgaacgttctttttcgcaacgggtttgccgccagaacacaggtgtcgtgaccgcgggcggccgccgctagcgctaccggtcgccaccatggtgagcaagggcgaggaggataacatggccatcatcaaggagttcatgcgcttcaaggtgcacatggagggctccgtgaacggccacgagttcgagatcgagggcgagggcgagggccgcccctacgagggcacccagaccgccaagctgaaggtgaccaagggtggccccctgcccttcgcctgggacatcctgtcccctcagttcatgtacggctccaaggcctacgtgaagcaccccgccgacatccccgactacttgaagctgtccttccccgagggcttcaagtgggagcgcgtgatgaacttcgaggacggcggcgtggtgaccgtgacccaggactcctccctgcaggacggcgagttcatctacaaggtgaagctgcgcggcaccaacttcccctccgacggccccgtaatgcagaagaagaccatgggctgggaggcctcctccgagcggatgtaccccgaggacggcgccctgaagggcgagatcaagcagaggctgaagctgaaggacggcggccactacgacgctgaggtcaagaccacctacaaggccaagaagcccgtgcagctgcccggcgcctacaacgtcaacatcaagttggacatcacctcccacaacgaggactacaccatcgtggaacagtacgaacgcgccgagggccgccactccaccggcggcatggacgagctgtacaagtgaccggtcatcatcaccatcaccattgagtttaaacccgctgatcagcctcgactgtgccttctagttgccagccatctgttgtttgcccctcccccgtgccttccttgaccctggaaggtgccactcccactgtcctttcctaataaaatgaggaaattgcatcgcattgtctgagtaggtgtcattctattctggggggtggggtggggcaggacagcaa

SEQ ID NO: 2802 - DNA, 4608 bp, Artificial Sequence
  Transgene
  misc_feature (16)..(34): Spacer (exemplary spacer 1 sequence of SEQ ID NO:416)
  misc_feature (35)..(298): U6 promoter (SEQ ID NO:417)
  misc_feature (299)..(402): S. aureus gRNA w/ targeting domain of CEP290-323
  misc_feature (423)..(686): U6 promoter (SEQ ID NO:417)
  misc_feature (687)..(790): S. aureus gRNA w/ targeting domain of CEP290-64
  misc_feature (817)..(1108): hGRK1 promoter
  misc_feature (1109)..(1272): SV40 splice donor (SD)/splice acceptor (SA) site
  misc_feature (1276)..(1288): Consensus Kozak sequence
  misc_feature (1291)..(1311): SV40 nuclear localization signal (NLS)
  misc_feature (1321)..(4479): Codon-optimized S. aures Cas9 (SEQ ID NO:39)
  misc_feature (4486)..(4506): SV40 nuclear localization signal (NLS) (SEQ ID NO:422)
  misc_feature (4654)..(4713): Mini polyA (SEQ ID NO:424)
gcggccgcggttcctcagatctgaattcggtaccaaggtcgggcaggaagagggcctatttcccatgattccttcatatttgcatatacgatacaaggctgttagagagataattagaattaatttgactgtaaacacaaagatattagtacaaaatacgtgacgtagaaagtaataatttcttgggtagtttgcagttttaaaattatgttttaaaatggactatcatatgcttaccgtaacttgaaagtatttcgatttcttggctttatatatcttgtggaaaggacgaaacaccgttctgtcctcagtaaaaggtagttatagtactctggaaacagaatctactataacaaggcaaaatgccgtgtttatctcgtcaacttgttggcgagattttttcgacttagttcgatcgaaggaaggtcgggcaggaagagggcctatttcccatgattccttcatatttgcatatacgatacaaggctgttagagagataattagaattaatttgactgtaaacacaaagatattagtacaaaatacgtgacgtagaaagtaataatttcttgggtagtttgcagttttaaaattatgttttaaaatggactatcatatgcttaccgtaacttgaaagtatttcgatttcttggctttatatatcttgtggaaaggacgaaacaccgtcaaaagctaccggttacctggttatagtactctggaaacagaatctactataacaaggcaaaatgccgtgtttatctcgtcaacttgttggcgagattttttggtaccgctagcgcttaagtcgcgaagggccccagaagcctggtggttgtttgtccttctcaggggaaaagtgaggcggccccttggaggaaggggccgggcagaatgatctaatcggattccaagcagctcaggggattgtctttttctagcaccttcttgccactcctaagcgtcctccgtgaccccggctgggatttagcctggtgctgtgtcagccccggtctcccaggggcttcccagtggtccccaggaaccctcgacagggcccggtctctctcgtccagcaagggcagggacgggccacaggccaagggctctagaggatccggtactcgaggaactgaaaaaccagaaagttaactggtaagtttagtctttttgtcttttatttcaggtcccggatccggtggtggtgcaaatcaaagaactgctcctcagtggatgttgcctttacttctaggcctgtacggaagtgttacgcggccgccaccatgggaccgaagaaaaagcgcaaggtcgaagcgtccatgaaaaggaactacattctggggctggacatcgggattacaagcgtggggtatgggattattgactatgaaacaagggacgtgatcgacgcaggcgtcagactgttcaaggaggccaacgtggaaaacaatgagggacggagaagcaagaggggagccaggcgcctgaaacgacggagaaggcacagaatccagagggtgaagaaactgctgttcgattacaacctgctgaccgaccattctgagctgagtggaattaatccttatgaagccagggtgaaaggcctgagtcagaagctgtcagaggaagagttttccgcagctctgctgcacctggctaagcgccgaggagtgcataacgtcaatgaggtggaagaggacaccggcaacgagctgtctacaaaggaacagatctcacgcaatagcaaagctctggaagagaagtatgtcgcagagctgcagctggaacggctgaagaaagatggcgaggtgagagggtcaattaataggttcaagacaagcgactacgtcaaagaagccaagcagctgctgaaagtgcagaaggcttaccaccagctggatcagagcttcatcgatacttatatcgacctgctggagactcggagaacctactatgagggaccaggagaagggagccccttcggatggaaagacatcaaggaatggtacgagatgctgatgggacattgcacctattttccagaagagctgagaagcgtcaagtacgcttataacgcagatctgtacaacgccctgaatgacctgaacaacctggtcatcaccagggatgaaaacgagaaactggaatactatgagaagttccagatcatcgaaaacgtgtttaagcagaagaaaaagcctacactgaaacagattgctaaggagatcctggtcaacgaagaggacatcaagggctaccgggtgacaagcactggaaaaccagagttcaccaatctgaaagtgtatcacgatattaaggacatcacagcacggaaagaaatcattgagaacgccgaactgctggatcagattgctaagatcctgactatctaccagagctccgaggacatccaggaagagctgactaacctgaacagcgagctgacccaggaagagatcgaacagattagtaatctgaaggggtacaccggaacacacaacctgtccctgaaagctatcaatctgattctggatgagctgtggcatacaaacgacaatcagattgcaatctttaaccggctgaagctggtcccaaaaaaggtggacctgagtcagcagaaagagatcccaaccacactggtggacgatttcattctgtcacccgtggtcaagcggagcttcatccagagcatcaaagtgatcaacgccatcatcaagaagtacggcctgcccaatgatatcattatcgagctggctagggagaagaacagcaaggacgcacagaagatgatcaatgagatgcagaaacgaaaccggcagaccaatgaacgcattgaagagattatccgaactaccgggaaagagaacgcaaagtacctgattgaaaaaatcaagctgcacgatatgcaggagggaaagtgtctgtattctctggaggccatccccctggaggacctgctgaacaatccattcaactacgaggtcgatcatattatccccagaagcgtgtccttcgacaattcctttaacaacaaggtgctggtcaagcaggaagagaactctaaaaagggcaataggactcctttccagtacctgtctagttcagattccaagatctcttacgaaacctttaaaaagcacattctgaatctggccaaaggaaagggccgcatcagcaagaccaaaaaggagtacctgctggaagagcgggacatcaacagattctccgtccagaaggattttattaaccggaatctggtggacacaagatacgctactcgcggcctgatgaatctgctgcgatcctatttccgggtgaacaatctggatgtgaaagtcaagtccatcaacggcgggttcacatcttttctgaggcgcaaatggaagtttaaaaaggagcgcaacaaagggtacaagcaccatgccgaagatgctctgattatcgcaaatgccgacttcatctttaaggagtggaaaaagctggacaaagccaagaaagtgatggagaaccagatgttcgaagagaagcaggccgaatctatgcccgaaatcgagacagaacaggagtacaaggagattttcatcactcctcaccagatcaagcatatcaaggatttcaaggactacaagtactctcaccgggtggataaaaagcccaacagagagctgatcaatgacaccctgtatagtacaagaaaagacgataaggggaataccctgattgtgaacaatctgaacggactgtacgacaaagataatgacaagctgaaaaagctgatcaacaaaagtcccgagaagctgctgatgtaccaccatgatcctcagacatatcagaaactgaagctgattatggagcagtacggcgacgagaagaacccactgtataagtactatgaagagactgggaactacctgaccaagtatagcaaaaaggataatggccccgtgatcaagaagatcaagtactatgggaacaagctgaatgcccatctggacatcacagacgattaccctaacagtcgcaacaaggtggtcaagctgtcactgaagccatacagattcgatgtctatctggacaacggcgtgtataaatttgtgactgtcaagaatctggatgtcatcaaaaaggagaactactatgaagtgaatagcaagtgctacgaagaggctaaaaagctgaaaaagattagcaaccaggcagagttcatcgcctccttttacaacaacgacctgattaagatcaatggcgaactgtatagggtcatcggggtgaacaatgatctgctgaaccgcattgaagtgaatatgattgacatcacttaccgagagtatctggaaaacatgaatgataagcgcccccctcgaattatcaaaacaattgcctctaagactcagagtatcaaaaagtactcaaccgacattctgggaaacctgtatgaggtgaagagcaaaaagcaccctcagattatcaaaaagggcggatcccccaagaagaagaggaaagtctcgagctagcaataaaggatcgtttattttcattggaagcgtgtgttggttttttgatcaggcgcgtccaagcttgcatgctggggagagatctgcggccgc

SEQ ID NO: 2803 - DNA, 4890 bp, Artificial Sequence
  Transgene w/ AAV2 ITRs
  misc_feature (1)..(141): AAV2 Inverted Terminal Repeat (ITR)
  misc_feature (157)..(175): Spacer (exemplary spacer 1 sequence of SEQ ID NO:416)
  misc_feature (176)..(439): U6 promoter (SEQ ID NO:417)
  misc_feature (440)..(543): S. aureus gRNA w/ targeting domain of CEP290-323
  misc_feature (564)..(827): U6 promoter (SEQ ID NO:417)
  misc_feature (828)..(931): S. aureus gRNA w/ targeting domain of CEP290-64
  misc_feature (958)..(1249): hGRK1 promoter
  misc_feature (1250)..(1413): SV40 splice donor (SD)/splice acceptor (SA) site
  misc_feature (1417)..(1429): Consensus Kozak sequence
  misc_feature (1432)..(1452): SV40 nuclear localization signal (NLS)
  misc_feature (1462)..(4620): Codon-optimized S. aures Cas9 (SEQ ID NO:39)
  misc_feature (4627)..(4647): SV40 nuclear localization signal (NLS) (SEQ ID NO:422)
  misc_feature (4654)..(4713): Mini polyA (SEQ ID NO:424)
  misc_feature (4750)..(4890): AAV2 Inverted Terminal Repeat (ITR)
cctgcaggcagctgcgcgctcgctcgctcactgaggccgcccgggcaaagcccgggcgtcgggcgacctttggtcgcccggcctcagtgagcgagcgagcgcgcagagagggagtggccaactccatcactaggggttcctgcggccgcggttcctcagatctgaattcggtaccaaggtcgggcaggaagagggcctatttcccatgattccttcatatttgcatatacgatacaaggctgttagagagataattagaattaatttgactgtaaacacaaagatattagtacaaaatacgtgacgtagaaagtaataatttcttgggtagtttgcagttttaaaattatgttttaaaatggactatcatatgcttaccgtaacttgaaagtatttcgatttcttggctttatatatcttgtggaaaggacgaaacaccgttctgtcctcagtaaaaggtagttatagtactctggaaacagaatctactataacaaggcaaaatgccgtgtttatctcgtcaacttgttggcgagattttttcgacttagttcgatcgaaggaaggtcgggcaggaagagggcctatttcccatgattccttcatatttgcatatacgatacaaggctgttagagagataattagaattaatttgactgtaaacacaaagatattagtacaaaatacgtgacgtagaaagtaataatttcttgggtagtttgcagttttaaaattatgttttaaaatggactatcatatgcttaccgtaacttgaaagtatttcgatttcttggctttatatatcttgtggaaaggacgaaacaccgtcaaaagctaccggttacctggttatagtactctggaaacagaatctactataacaaggcaaaatgccgtgtttatctcgtcaacttgttggcgagattttttggtaccgctagcgcttaagtcgcgaagggccccagaagcctggtggttgtttgtccttctcaggggaaaagtgaggcggccccttggaggaaggggccgggcagaatgatctaatcggattccaagcagctcaggggattgtctttttctagcaccttcttgccactcctaagcgtcctccgtgaccccggctgggatttagcctggtgctgtgtcagccccggtctcccaggggcttcccagtggtccccaggaaccctcgacagggcccggtctctctcgtccagcaagggcagggacgggccacaggccaagggctctagaggatccggtactcgaggaactgaaaaaccagaaagttaactggtaagtttagtctttttgtcttttatttcaggtcccggatccggtggtggtgcaaatcaaagaactgctcctcagtggatgttgcctttacttctaggcctgtacggaagtgttacgcggccgccaccatgggaccgaagaaaaagcgcaaggtcgaagcgtccatgaaaaggaactacattctggggctggacatcgggattacaagcgtggggtatgggattattgactatgaaacaagggacgtgatcgacgcaggcgtcagactgttcaaggaggccaacgtggaaaacaatgagggacggagaagcaagaggggagccaggcgcctgaaacgacggagaaggcacagaatccagagggtgaagaaactgctgttcgattacaacctgctgaccgaccattctgagctgagtggaattaatccttatgaagccagggtgaaaggcctgagtcagaagctgtcagaggaagagttttccgcagctctgctgcacctggctaagcgccgaggagtgcataacgtcaatgaggtggaagaggacaccggcaacgagctgtctacaaaggaacagatctcacgcaatagcaaagctctggaagagaagtatgtcgcagagctgcagctggaacggctgaagaaagatggcgaggtgagagggtcaattaataggttcaagacaagcgactacgtcaaagaagccaagcagctgctgaaagtgcagaaggcttaccaccagctggatcagagcttcatcgatacttatatcgacctgctggagactcggagaacctactatgagggaccaggagaagggagccccttcggatggaaagacatcaaggaatggtacgagatgctgatgggacattgcacctattttccagaagagctgagaagcgtcaagtacgcttataacgcagatctgtacaacgccctgaatgacctgaacaacctggtcatcaccagggatgaaaacgagaaactggaatactatgagaagttccagatcatcgaaaacgtgtttaagcagaagaaaaagcctacactgaaacagattgctaaggagatcctggtcaacgaagaggacatcaagggctaccgggtgacaagcactggaaaaccagagttcaccaatctgaaagtgtatcacgatattaaggacatcacagcacggaaagaaatcattgagaacgccgaactgctggatcagattgctaagatcctgactatctaccagagctccgaggacatccaggaagagctgactaacctgaacagcgagctgacccaggaagagatcgaacagattagtaatctgaaggggtacaccggaacacacaacctgtccctgaaagctatcaatctgattctggatgagctgtggcatacaaacgacaatcagattgcaatctttaaccggctgaagctggtcccaaaaaaggtggacctgagtcagcagaaagagatcccaaccacactggtggacgatttcattctgtcacccgtggtcaagcggagcttcatccagagcatcaaagtgatcaacgccatcatcaagaagtacggcctgcccaatgatatcattatcgagctggctagggagaagaacagcaaggacgcacagaagatgatcaatgagatgcagaaacgaaaccggcagaccaatgaacgcattgaagagattatccgaactaccgggaaagagaacgcaaagtacctgattgaaaaaatcaagctgcacgatatgcaggagggaaagtgtctgtattctctggaggccatccccctggaggacctgctgaacaatccattcaactacgaggtcgatcatattatccccagaagcgtgtccttcgacaattcctttaacaacaaggtgctggtcaagcaggaagagaactctaaaaagggcaataggactcctttccagtacctgtctagttcagattccaagatctcttacgaaacctttaaaaagcacattctgaatctggccaaaggaaagggccgcatcagcaagaccaaaaaggagtacctgctggaagagcgggacatcaacagattctccgtccagaaggattttattaaccggaatctggtggacacaagatacgctactcgcggcctgatgaatctgctgcgatcctatttccgggtgaacaatctggatgtgaaagtcaagtccatcaacggcgggttcacatcttttctgaggcgcaaatggaagtttaaaaaggagcgcaacaaagggtacaagcaccatgccgaagatgctctgattatcgcaaatgccgacttcatctttaaggagtggaaaaagctggacaaagccaagaaagtgatggagaaccagatgttcgaagagaagcaggccgaatctatgcccgaaatcgagacagaacaggagtacaaggagattttcatcactcctcaccagatcaagcatatcaaggatttcaaggactacaagtactctcaccgggtggataaaaagcccaacagagagctgatcaatgacaccctgtatagtacaagaaaagacgataaggggaataccctgattgtgaacaatctgaacggactgtacgacaaagataatgacaagctgaaaaagctgatcaacaaaagtcccgagaagctgctgatgtaccaccatgatcctcagacatatcagaaactgaagctgattatggagcagtacggcgacgagaagaacccactgtataagtactatgaagagactgggaactacctgaccaagtatagcaaaaaggataatggccccgtgatcaagaagatcaagtactatgggaacaagctgaatgcccatctggacatcacagacgattaccctaacagtcgcaacaaggtggtcaagctgtcactgaagccatacagattcgatgtctatctggacaacggcgtgtataaatttgtgactgtcaagaatctggatgtcatcaaaaaggagaactactatgaagtgaatagcaagtgctacgaagaggctaaaaagctgaaaaagattagcaaccaggcagagttcatcgcctccttttacaacaacgacctgattaagatcaatggcgaactgtatagggtcatcggggtgaacaatgatctgctgaaccgcattgaagtgaatatgattgacatcacttaccgagagtatctggaaaacatgaatgataagcgcccccctcgaattatcaaaacaattgcctctaagactcagagtatcaaaaagtactcaaccgacattctgggaaacctgtatgaggtgaagagcaaaaagcaccctcagattatcaaaaagggcggatcccccaagaagaagaggaaagtctcgagctagcaataaaggatcgtttattttcattggaagcgtgtgttggttttttgatcaggcgcgtccaagcttgcatgctggggagagatctgcggccgcaggaacccctagtgatggagttggccactccctctctgcgcgctcgctcgctcactgaggccgggcgaccaaaggtcgcccgacgcccgggctttgcccgggcggcctcagtgagcgagcgagcgcgcagctgcctgcagg
